United States Patent Application Publication US 2026/0191916 A1 - sequence listing, part 83

SEQ ID NO: 582 - DNA, 5013454 bp, Blautia FBI02891 (residues 1,671,153-3,342,304 of 5,013,454)
  source 1..5013454: mol_type = genomic DNA
cagcctccaggaggccagagtcctggctgacccacaggtacagatggtggacttaaaaggccgtaccatgctcccggcgtttctggatgcccacagtcattttgtgggggcggccaatgcactgctccaggtatctttagaggaggtaacgaattttaaggagctcaaagaggccctcttagaatttttggacaaaaatcagaaaaaaccaggggagtggatcatggccagaggctttgaccacaatcaaatggaagaaaaagcctttcccacacgggaatttctggatgccctggcaccggaaaaccctgtggtcattcaacataaatccggtcatatggggtctatgaacagcctggcgttaagggagctgggaattaccccagagacaccggaccctcaggggggacggatcggaagagatgagaagggactcaccggttatctggaggaaaatgcctttgtggaggcggtgcagaaggcgcctcagccagatatgcgccagtttatgaaggcctgccgggatgcccaggagctgtatgcttcctacgggatcaccacggtccaggagggcatgcttccaggccagatggtgcccatgtaccgtcagtttgcggacagcgggctattttatctggatgtggtggcttatggagacagaaaagatgcgaaggagatcagggaggccctgaaggactatgtgggcggttatcacaatcatctgaagctgggtggttataagatctttctggatggttcgccccagggaaggactgcctggatgcaggagccttatgaggggagcaaggactacaggggatacggcactatggaagaccaggcggtctatgaagcggttgtccaggcctgcgaagatcacctgcagcttctggctcactgcaacggggatgctgcctgcgtccagtatatccatgcagtgcaaaaggcccaggaggatgggtattgtgtacaagcccttcgtccagtgatgatccatgcccagtttcttccaaaggaccaccttgcccaggtgaaagcatgcggcatcctgcccagctttttcattgcccatgtgtatcattggggggagatccatgtggagaatatgggacttcccagggcagaggccatctcaccggcaggctcgaccttaaaggctggcatcacttttaccttccatcaggataccccggtgatcccgcctaatatgctggagacggtgtggtgtgccgtgaaccggagatcaaaggaaggcaggatcctgggagaaaaggagcggatttccccatatgaagctttgaaggcagttaccatccatgccgcttaccaatattttgaggaagacaccaagggaagtataaaaccaggaaaaaatgcagatttcgtcattttggacaaaaatcctctaaaagtgccccagatggaaatccgccacattcaggtaatggagaccattaagggagaccgccccatctttgaacgatagacaaaggggatttcatttttgacaaaaaatcttgacgaatgaaataaaaagagttaaaattgctttagcgttctaaatgattactaatttaaaacgaaaattcggtgaagagaacaagtaaaaacaggaagcgtacgcacagagagctgccggctggtggaaggcagcggtccttctgttttgaagatcatctctgagaagggaagctgaaagagttatccagtaggcttccacgggggtttcccgttacaggaaccgcgtatgccggtacgttgtattcgtacttgtttcaatggagacagggtggttgcggaagaattatgtccgtccctagtttggggcgggcttttttattgcatggaacgttttaagaacgtttcatgcagtaaaaaactccgggggagatgcacacaatgtgccaaggaaagctgctttgcagctgcacattggcacataaagctgtcaagctccttaggagtgagggaggcacccaatgtttctttttagcagcggacaatacgcacacggcaaaaataaaatttgaggaggagaggacatgagaacctacaaaaaagttatggatgcccttgcggtggcagagaaatttatccttgtggtatccacattgctgatcctggttttgaccgtggggaatgttttttcccgcaaggtcattcaccagtcctggtcgtttaccgaagagttggtggttgcggtattcgtcctgatcacgctgctggcagcagcgctggcctgcagggagggagagctggtgagcctgacactggtcacggaccggcttcccaagaagctgagaaagccttcggtgatcattatcacggtgctgagtattttctttacagctatcttgtttaaatatggcctggataaagttatcacccaactggaaaatggaaagaggacctttgtgctgaactggccagaatggattttctggtcctttgtgcccattggcgcagcatgtatgatcctgcattttattgaattttgtttagatgtctgtgtgggaaaggaggacaataagaaatgatcagtgcaatcttgtttatttccttctttattttcttggttctgggagtgcccatcggaatctgtctgggcctgtcttcggtgtgtgccatcttgtattccggcacctctttgaccattgtggcaacaaatatgtattccgggatcagcaagtttctgctgctggccattcccttctttgtgctgtcgggaaatatcatggccaaggccggaatttccaagcggctcatccggtttgtggacacctgtgtgggacacagaagaggagggatcgccattgtatgtgttatcgtggcctgtttctttggcgccatctcaggctccggacctgccactgtggcagctctgggggctgtgctcattccagctatggtggagcaggggggctttggcgcacctttttctacggcccttatggcaacggccagttccatagccattgttatacctccaagcattgccttcgtggtatatgcatccatcacaggcgtatccattgcagatatgtttatggctggaattgttcccggtattctcatgggagcggctcttgtggtggtagttatggtggaggccagaaagcacaacatccagccttctgagaagaaggccagtgccagggaacgctgggaagctttcaaggatgccttctggggctttttgatgccggtgatcatcctgggcggtatttacggcggattttttacccccaccgaggcagcggccgtgtctgtggtatacggactgtttgtgggcatggtgatctataaagaggtaagttttaaggatctatggaatattttcattgattctggcaagaccaccggaggcattatgctcattgttgcctgtgcctctttgttttcctttgtgtgtacccagttcgggattgcccaggcggcttctgaccttctgggaagcattgcccataatcaatttaccttcttgctgatcgtaaatgttattttcttgatcgcgggctgctttattgatgccaactcagccatgtacatctttgtccccatcatgcttcctgtatgtaaagcactgggatacgatgtggttgcctttggtattatggctactgtcaacctggccatcgggcaggtgacccctccggtgggtgtcaacctgtttgtggccattgggattaagatcaagaagggcatggaggtgaccctccagcagatttcaaaagcagtggtgcctatgatcgccgcctgtgtggcagtcctgctgatcgttacttatattccttcagtatccaccttccttccaaaggtcctggcgggaaacagtggtacctacagcggggacgcagagcttgtggatgatgggggccagagctctggaacagaggggtcagcctcctatgataaaataggggattacagtgatctaaactgggaggagcagacctggaattttgcctgctccaccacagagaccagcacctgggccaagggcggcgagaagttcgcagagcttatggaaaaagccaccggcggcaaagtcaaggtgaaggtctatgcggctgaccagcttaccaacggaaatcagtcggaggggattcaggcgctgatgaacggggatccggtgcagatctccatgcacagcaacctgatctactctgcttttgacccaagatttaacgtggtatccctgcccttcctctttgaatccgtggaagatgcggatgccaaactggacggtgaggcaggagagaagctaaaagaaatcctctcggaatatggactgcactgcatgggcattgcagagaacggcttccgccagctcaccaacaatgttcatgaaataaaatccgttgaggatatgaaaaacctgaagatccgtgtggcaggaagcaatctgctcatggaatgctataagagatggggcgcagatgccaccagtatgaactggtctgagacatatacggcgcttcagcaaaagaccgtggagggccaggaaaatcccctgcctgccattgatgcggccagtgtccaggaagtacagccctactgttctttgtggaacgccaactatgactgtctgttcttctgcatgaaccaggagatttacgacagcctcaccccggagcagcaggctgttgtggacgaagcaggcatgaaggctgtggagtatgaacgagagatcaaccgtgccggggatgatgagatcaaaagccgctggcaggacaaaaacggtgtgaccatcacagccaatgaggagctggatctggattccttcaagaagtctgtggagggtattgagcagtggtatcaggaagagctggaaggccagggctatttagatgcctcacaactcattgagacatttacctcaaaagagctgaaagccgcacaggaggattatcaggtggctgatcacagtgatctaaactggaaggagcagacctggaactttgcctgctccaccacagagaccagcacctgggcagagggtggacgcaaattcggcgagctggtggaaaaagccacaggcggtaagatcaaggtaaatatctatgcagccgaccagctcaccaacggaaatcagtcggagggaatccaggcgttgattgatggggacccggtgcagatctccatgcacagcaacctgatctactcagcctttgacccaagatttaatgcagtctccctgcccttcctctttgaatccgtacaggatgcagacgctaaattagatggccaggcaggagaaaagctgaaggaaattctatctgaatacggtctgcactgtatggggatcgcagagaacggcttccgccagctcaccaacaatgtgcgggaagtgaaatccgttgaggatatgaaaaatctgaagatccgtgtggcaggaagcaacctgcttatggaatgttataaacgctggggtgcggacggaaccagcatgaactggtctgaaacctatactgcccttcagcagaaaaccgtggagggacaggaaaatccccttcccgccattgatgcggccagtgtccaggaggtacagccctactgttctttgtggaatgccaattatgactgtctgttcttctgcattaatcagaaaatctatgacagcctgacaccccagcagcaggccgttattgatgaatgcggcacaaaagccaccaagtatcagaggcagatcaaccgggcgggagatgatgagatcaaaagccgctgggtagagaaaaacggtgttgcctttgtggaaaatgaagacctgaatctggactcctttaaggaggctgttaacggaatcgaagactggtttgtggaggaattaaagaaccagggttatgaggacggtcaggagctggtagacgcatttaaataaattgtcagttacacccataaaaaataaataaaggaaaaaggctgtgtgcaaaaagacctgccaggcagaaattgtcctcttttcataagaggagttctgccgggacatggttttcttgtggcagcctttttccattgtaaattgatagacaatctatgccagtagttttgcaggatgattacaaatgataggctgcttgggaggaaacagaccttgtgtgaaggcgccgtggttgacggaatgggccgggactgctaagataataaggaaaatttgcaaattgccggtcatacagagaacggtaactatgcccaggaaagacaggagagaagaattatgattttatttaccagcgattatacagaaggcgcccatgagagaatcatggaaaagcttatggaaactaatttacagcagaccattggctatggctgcgatgattattgccgccaggccggggagctgatcaaaggcttatgtaaaaaagaggatgtaaaggtacactttttggtgggaggcacccagaccaacaccacagtcattgcatccgtccttcggcctcaccagggagtgatcggtgccgagactgcccatattgctgtccatgagaccggagccattgaaagcacaggacacaaggtcctcacccttcccgaaaaggagggaaagatcacggcagagcaggtggaggctctcttaagggaccacacagaggatgaaagctttgagcacacagtacagcccaagctggtgtacctgtccaatcccactgagcttggcaccatttatacaaaagaagagctgacaaggatttccgctgtgtgcagacaaaacggcctttatctgtatgtggacggggcacgtctggcttatggactgtcagccttggacaatgatctgactttagaggatctggccagattgtgtgatgttttttatattggaggaacgaaggtgggagcgctcttcggagaggcagtggtgatctccaatccggccctgcaggaggatttccggtatctgatcaagcagaggggcggtatgctggcaaaaggaaggcttctgggaattcagttcctggagctgataagagatggcctatattgggagctgggccgccatggagatgaaatggcaaagaagatccggcaggctcttagagaaaaggggtattccttcctggtggaaagccacacgaatcagatcttccccattcttccccacgacgtgataaaaaggctggagaaggattttggttttgaattccagcagaaaattgatgaaaatcacagtgcggtgcgcttctgcacaagctgggcaaccacccaggaacaggtgcaggctttgatcaatgctctgtgatctatggcaggcggccatttgcaagacggtgtaaaaggcagtttcctataaaattcctatgatccgcagggcacaccataccagaaggagagccatgatcacgttcataagtttataatgttctgtgtagaaacgcttcagcacatttccggcaaaggcccagatcaggttgcctatggcgcccaggatcatcaggtatactgcaaagagaaacaaaacagcggggcgggtttcatagggcaggataaaggaggaaaacatggtcaggccatagataatgatcttcacatttaccagctgaaggaggatccccatggggtaggaaggctccttatccgagcggttttcccctggaggcagtctgcaaaaggtctgccaggccaggtagagaatgtaggctgctcccacgtatttcatcacgggctggatgcctgggatcacctttcccagagcgctgcagaacaggccgcttaagcacataagagtcagagagccagtccagatgcccagcataaattttagattttttttgatgccgtatttgctggcagtggataataaaagaatgttgttggggccgggagaccatacggtgacgcaggcggagatggtcatttcccagaacacagaaaatggcatggatatccttcctttctacttttatactttttcatagtatagcataaaagcggccgaaaaagaatcttaattacaaaaattcccataggatttcatgaaaaaacacaagccggttttcaaaatttttgtgccagtacacaggagcagaaaaaccagtatcggaaagacccatcagtgagaaactagaaaccgtgggagcatttacaaaggacccggaaacgtttacaatggatttatcaaaaaaatggataaattcagttattcatggaaagtattgagactggaggaagggacataggatatgaaatatcggctgcatcagcgcctggcagcgtttccggacaatggggacctgcaggatggagaatatctggtacagattgtcagtgagaaggaatttcaggaacagcggggagaaaccctggaggggaaacggatcctgggaagcatgagaaattttcagtactgcaaagcagagctgcttatggattttgccataggcaccttcgtgatccccaaaaaagaaaatcttctggaaagggaagcctgctacggcttttatatggacagggagaaactgatctttgtggacaatggtagccatgtggaaaagatcctggatgagatggtagaaaatcaatacatggaccaggagcacattccccacgtgctttttaccttcatggaatttttggtgaaccaggatgttccctatctgcaggagtttgaggagcagatgtctaagatggaggaggaaatgctccacggcagggagagagggctgacagaacggctgatgcatctgcgcagaagcctgctacggctgggtgcctattataaccagcttttggatatgagcgagaccctgtgtgacaattataatcaaatgctggatgaggaggaatgccggctgtttaagctattttccgaccgggtggcccggctcattggaaatgtgcagaatctaaaggagtattccatccagatccaggaaatgtatgagacacaaaatgagatcaaacagaatcacgtgatgcagtttctcaccgtggtcaccaccttgttcatgcctctgacgcttctcactggttggtatggtatgaattttgctggcatgagagagctgacaagcccctggggttatccggcagtgatcgggatcagtgtgctgctggtgctcctggaattaatctatttcaaaagaaagaagtggctgtagctgccagacctgatcctgaatgaatggaaaccaaaggaaaaactttggggaaaatggatatttctggagaaaatgcgtaaaatttaatgatgatcaggaaaagctatgatataataataccatactttagtagacgcagacaacgccatagcccagaggccacgcaattggagccgccctttctgggcaaggtctgcaggcagaaaagggagggcgttacgttcccttttcccggaaaagaaaagagatggggtgaagtttatgttaaaaaactggaatccggcgcagataccggaggaagaggaattggagcagcggctggaggccgccagggggaagctttatgaacagcagctacggatcaaggagcacaagctgccggttctggtgctttttgaaggctggggagcttccggaaagggaagtatgatcgggaaggtgatcaaaaatattgaccccaggttttttaaagtggcaaccatgtccgctcccacccaggaggagctgcgcaggccatttttatacaggtattttaaggaaatccctgagacaggaaagtttaccttcctagattctgggtggatggatgagaccaccagggagtgcttaagaggggagctcaaaggagaaaattaccgggaccggatggacagcattaagcggtttgaacgccagcttacggacaatgggtatctggtgatgaaattcttctgtcagatcagtcagaaggagcaggccaagcgcatgaaacggcttttggaggacaaggacaccaaatggcgggtgagtgactatgaccaatggcagaatgagcattataagaagtgctttaaggtatacgaccagtatctggcagacactcatacctccccggcgccctggtatatcgtggatgccaaggacaagaaatgggcggagcttcaggttctggagacgcttgtgggaggaattgagattgcggtgcagaacaataagctgtcctcgcccctgatccagaatatttttcccatggtaaaaatgcccaagctcaaggatgtgaagctggaggacaagtctctcacagaggaagagtacagaacttccctcaaggatcttcaaagacggcttggggaacttcacaacagggtttaccgcaagcgtgtgcctgtgatcatcacctatgaagggtgggatgcggcaggtaaaggaggaaacattaagcgtatcacaggagccctggatcccagaggctttgaggtgcatcccatcgccagtccggagccccatgagaaggccaggcactatctgtggagattctggaccaggcttcccaaggacgggcatattgccatttttgacaggacctggtacggccgtgtgatggtagagcgcctggagggcttctgctcggaaaacgactggaagagagcctacaacgagatcaatgagtttgagaaggagctgacggactggggagctgtgctcataaaattttgggtacagattgataaggatacccagcttgccaggttcacggagagacagaacaatccggagaagcagtggaagatcacagatgaggactggagaaaccgggagaagtgggaccagtatgaggtggcagtcaatgagatgctgaaaaagaccagcaccacctttgccccctggcatatcctggagtccgtggataagaaatatgcccggatcaaagcactgaggatcgtggtggaggagctggaaaaagccctccagtaaggccaaaaagagagtcttgtatccattgaagaaagctttagaaaaggctgtatgagtgtttttgcacatagaaaaacactggcatggcccttggcagaaagtgcggcagcgtactttttgtcaagggcttttattttttatatttttcctgaaatcgtatatttagccagccgatggagaatcattttattatcgaaggatgataggaggattcttaagatggcactgaataaggttgaaatatgcggtgtaaatacggcaaagcttccggtactgactcatgaagaaaaggaggagcttttccggaaaataagggaaggcgatgaggaagcccgggagcggtacattaaaggaaatttaagattagtattaagcgtgatcaagcggtttcagagcagtaatgagaatgcggatgatctgtttcaaatcgggtgtattggcctgatcaaagccattgataatttcgataccactttgggcgtgaaattttccacttatgcggtccccatgatcattggggagatccgcaggtatctcagagacaacaattctatccgggtcagccggtctcttcgggacattgcctataaagcaatttacgccaaggaaagttatgtgaaggaacatctccaggagcccaccatcaatgaaattgcccaggaaatcggtattgagaaggagatgatcgtgtacgccttagatgcgatccaaaatcctgtgagtctctatgagcctgtgtacacggaaggaggagacaccctctatgtgatggatcagatcagtgataagaaaaataaagaagaacactggattgaggatatttcccttcgggatgccatggaaagactcaatgacagggaaaagcatattattcagatgagattttatgaaggaaaaacccagatggaggtggcagaagagattggtatttcccaggcccaggtgagccggctggagaaggcggctttgaagaatatgagaaattacttgagggcttagtctgtctttgcatattcttttctttcaagatatggtatacttctggtaagggatcagccggtcaaaagaaccggataggcagaggaagctgccggatttcaaagaagtacttcaaaggagagaaattgcaaaggagcagatgacaccatgagtgaatttcagataaaggccgtggtttttgatcaggacggcctgatgatcgacagcgagagagttgtaaaatactcctgggacgcagcgggagaggtgcttgggtatggaaggctgggggaggagaatattcacaatacccttggatataacctgaccaggagaaaggcatattttttggagcattatgggcaaggatttccctttgacagattccgggacgaatataccagagcttttcgggactataccagtaaaaatgccattcctgccaagaaggggctgtatgagcttttggatacgctggaaaaaagaggagtctctatggcagttgccacctcctcaagcagagaatacaccctacaaaacatggaaaggctgggaatttcccattattttcagggagtgctcaccgcagacatggtcacagaaggaaagccttctcctgagatttaccagaaggcctgtgcactccttggacaaaagccaagagaatgtctggctctggaggatgctcccaacggagttgtctccgcccatggggcagggatgcatgtgatcatggttccggatctgtgccgggattcttcctcagtagatgccctgttggacgggaagatggagtctcttgaggaagtggcccggtggattcaaagagaatttccgctggcttaaggctggggaaggtgagcggtatatggttatgggcagggtgctgtctgccacagggaaacaatgaaggataacagaagatgtacgagagaataccagaatttttacaggatattatgaaacatacgtatgaaggtcaggagaagcttggggcactgacacatttccgggtggaggtatccaggagaaggatgaagtccaagcttggggattactgcaggggcaggatacggatcttcggggctggaagtcatttgccggaggatctggctatcgcctgcatccatgagctggcacatcacgggacagcccttttgtatccaggcaccagggcccatggaccggagttctacaaagtgcatgagcagctgctttttacagctctttctatgggcgtgatcaccagagaggatgtaaaggaggcggcggccaagggaatggccagaaacaaaaagagggtagagaatatgctcagggattacagccccagggagattccctataagcaggggctgtggtacatacaggcgggaaacgtctatgaaatccggggaaggcttaaggaaagggactatttttatgatccggtatccaaatcctggggacgggaaataagccgggagaggattgaggaagaaaaagagcggatctatgaaacgtgtccaaaagcgcttgttatgtgcgatcccgcctgccggctgcggctggagcagtacgaaaccctgcggctggagggaaggacccaggaacatctctctgccatccgggagaacggttatcaatataaggatgggtattggatgaaaaccttgctgaaaaaggatttagaaaaagaattggatgtggtggaaggtctcaagggaatccgttggagcagtgtgtctgaaaaggaaacctgaagtcaggagataaaatcctggctccaggcagtgtgcagcatgacaggggccgctttatggctctaattttttttcgatttcttcacagatttcatcaacggatctgccgtctgtggagatgacaagatcagcggcggcctggtatttttccctgcgctgttccagaagggcctggatgtgggccacgttcttttttccctgaagaagagggcggctgtcgtcctgggacacccgttcaagaatggtctggggggaggcggtgagcagtattacacggccgtttttcttcatttctgccacattctgctctctcatggggacgccgcccccgcaggaaatgatggcgttggcatggccctgcatttcaatgagaaggctggtctccagaccccggaaatattcctctccgtcttcctgaaaaatgcgggaaatggattttccctctctttgagcgatcaattcatccatctccacaagctccatgtgatgccgttttttcagagcctgggcaatggtactttttccgcagcccataaatccgatgagtaccagattatagggatagatggttgtgttcattttagtttctcctttgcagcggacacttccccatggggatggtaggaacctgtgtccatttctcttagtaatgatactatgttgcggtaaagcggtcaagagctcttttggcagcgggtcagccggtgcgcagacactcctcctcctgaatctccaccaggatgatatcctctccgatctggcggatgcagttccagggtatgacatattcagaatccttgcagaagcagccccagaacttacctgggcctggtacaaccagggctgtcagcctgcctgtgacgcagtcaaactccacatcgatagggcagcccagagagcggcaggagcaggcattaataacgtctttttgttttaattcacaaagtctcatacaaatgcactttttttcaagattatgcgggaaaaaccaggaatattccaacgattttgttgacatgtccaggttttacgaagtatactatttttaaataagaataggataaaactggaagggggaactgcccgtgagatgtccgtactgcaatcaggataatacaagagtcgttgactccagacctgtggaggataccaattccatacgccgccgccggatgtgtgatgcctgcggaaagcgttttaccacttacgaaaaggtggagaccattcccttaagcgtgatcaaaaaggatgaaagcagggagcagtatgaccgctccaagatccagggaggaattatcagggcctgttataaacgtccgatttccgtggaacagattgacgttgtggtggatgccatagaggcagaggtgttcaacacagaggacagagagattcccagcacccgtattggagagatcgtcatggagcatctgaaggatctggatgccgtggcttatgtgcgttttgcctctgtttacagggaatttaaagatgtaaatacctttatggatgaattgaaaaaatttctgaattaaaaagaactgccttagagaaaggcaggatagtcataagaacaaagtgggtaagcccgcttcaactccccatcccctcactcatgaggggctcggccgtacaggaattgatcttctgtacggccgttttatgtggcatcgatccaaagaagactctcgttggcagattcttcggataggagagtataggatagtgctgcttttaagcttccttgcggtgccgctttaagggcgggaaggtaatggtgatggcggttccttctccaagactgctggtaagctgaagtctggctttgtgaagggatgccccgtgctttacgatggacaggccaagtccggtgccgccggtagctctggaatggcttttatccacccggtagaagcgttcaaagatccgctcctgttcctggggggcgatgccgattccgctgtccttcacggtccactggatactctggggagagccctgcatagtgatctcaatggtgcccttttccggggtatatttgatagcattgtccaccagattaaagagcatctccatgaggatctgccggtttccccggatgtaaagcgtctgtccctggagggaaagccgctgttgctttttatccagaggaagctgaagctgttccaaaacttcccgggtaagttccaagagattgacctcctcgaagggcagattctgggttccctcatccagtctggagagttggagaatatcctccaccagattggtcaggcgcacggcttcgtggtggatcctgcctgcgaactcaggaatatctttttcctggaccagaccgttctggataatttccgcataaccggagatggacataagaggggtcttgagctcgtgggttacgttggcagaaaattccctgcggaccatttccgcctcctttctctggatgagagagaaggtaaaggtaaggatcagcagcagtaaaaagaagagaaagataaatccaagcatcatggtgagcagcaggcttccggtggtgcgggagagccgcaggatcatgccattatccagctttacagcgtagtaaaaggtctgtttggacagggtttctgagaaacggaccatttcgcaggagcccttctgagaggccttgatgaattccgggcgattgctgtgattttccagatctcccggatttttctctgaatcatagagaacggtcccgtctgtgtcagccagagtgatgcggctggaggacagatttccaatttcctgggtcaggtaggaggtgcctgcgtcttcaatggcataacggatatattctgcctcatttttgatactctgcttcatgaccgtgttgaattccacatacatggccaggctggcggcacagaaggtgaccagcacggccagtacgataagcaggctcacccggtgtaggttttttaatttcatgtggtgcctccaatgcggtagccgatgccccggacggtctcaatgacagaggaagagaaggggagcttttggcgcagagtccgcacatgtacatccacggttctggtacccccatcgaaatcataaccccagatatggttcagaagctggtccctggtgagaacgatcccctgattctccaggagatacctaagaagctggaattcttttttggtgagggccacctcgctgcccttgtccagcacctgatgacgttcaatggagaggctgaggttaccgtaggtgagttccctctcctgtttgggttcacatctgcgaagaaccgcttttactctggcgataaattccatcatgccaaagggtttggtgatatagtcgtccgcaccctcctccagtcccttcactttatcaaattccgcactctttgcagtgaccatgataaccggaatattccgtgtccttggctggctttttaattttctaagaatggtatacccgtcctcgccgggcagcataatatcaagcaggatcaattgaggaagctcctcctccaaggcggcgtaaagctcctgggagcaggcggcgccccgggcctggtaacctgtggattttaaggtgtagattaagagctcccgtatatttttgtcatcttccagacagtagatcattgtcttcctccctctgctgcaggctttatttgttgtttgtaaccggccctttgtgagaacagggccggttacaaacaactttctgtattttacagtatagagggtttaggggcatttgacaagaaatcaataggatttttcctgggcagcctgcatcacataggccgcaatgttggaacagtgggcggccacacgctctaagctggtggtgatatccgtgaggataaagcccatttcaatggtacaggttccttcccggagacggcggatatggcgggccttcagctcccggccccagttctcaatggcctcctccatgggctccacatgaacagccagggaggcgtcggcagcatccagtacccggtaagtgatgtccagaatctccagggtggatttgatcatgatcttcagctcctcctgggccttggaggagaaggaaagtcccttctcatgcatttctctggcagagcctacaatgagcagagcatggtcagagatacgctccaggtcagccagactttgcagaagaatggaaagagcgtggctgtcctcctggttcaggtttttgttgctcagcttcagaagataggcgcccagctcctcctcgtagttgtctacctttgcctccaggatggtgacggtgttggccagctcttcatcatagttcatgagaagctccatggcctgccgcaggctgccctctgcatcctcagccatgatcatggctgcgtggcggctctgctgcatggcaaaagcgggtttttccagaaagcgggcgtccagtaccggaaggtctctggctggaagagaagccttgtcggaggccgctttgtcccggatggtgagagaggccagcttcaccagtccgttggagaagggaagcagcagtaaggtggcaaaaatgttaaaggcgctgtggactacagcaatgcctgctgcgtttgcatggtctcccaggaaggagaagtgaaaaacagcattcagggcatagaaaccgatcataaaggtaaaggtgccgataatgttaaagtacaggtggaccatagcggcccgctttgcatttttggatgctcccactgcggagatcagggctgtcacacaggttccgatgttctgtcccaggataattggcagagccgcactgtagcttacggctccggtgacacacaaagcctggagaatacccacagaagcagaagagctctggataatggcagtgagcaccgctccggccagcagacccaggatggggttggaaaatgccacaaagagcttggtgaactgaggaacctcagccaaaggcttcacagcgccgctcatggtatccataccgaacatgagtacagcgaatcccagcaggatcacgcccacatctttcttcttctggtttttggaaaacatgcacagaagaatgcccacaaaggctaaaaccggggaaaatgaggtgggcttcagaagctggataaagaaattgcttccttcaattcccgtgaggctcaaaatccaggaagtaatggtggtaccaatgttggcgcccatgatgatgctcactgcctggcctaatttcatgattcctgagtttacaaagcctaccaccatgactgtggtggcagaggaggactggataatggccgttacaccggctccaagcagaacgcccttcaggggattggaggtaagattctccaaaatccgttccaatcgtccaccggacagcttagacagcccgtcccccatcacattcattccgtagagaaaaaatgccagtcctccaataaaggttaaaatgctaaagaaatccatatgctcctcctttgtttaacagcaaagccgcaggtttgcccctttcaattgcgtttactatcatcatatggaggcaatgtaaaatctaaacaaggagttttgttaaatttgtgtaaaatttcaaaaggacagaaaaccacagaggcacataatgatcagaaatctatgataaacaaaaaaagcggccatctcctatttcaggagatggccgcgggaaaactgcgggactgggaattaaacgattccctgtgccttcatggcgtctaccactttctcaaagccggcaatgttggcgcctaccacataattgtctgttaagtcgtaacgttttgctgcatcgtctactttagcgaaaatatccttcataatattatgaagcttctcatccacttcctgagcgctccaggaaagtctcatggagttctgggtcatttccagagcagatgtggcaacaccgcctgcgttggcagcttttccaggcatgaacagaacgccgtttgccatcacatactgagtagcctccagagtagtaggcatgttggcgccttccacaagatacttgcagccgttagcaaccagaaccttggcaccgtcaatatccagctcgttctgggtagcgcagggaagatatacgtcacatttaatattccagatgccttttccttctgtgtaggtggagcctggaacacggtctgcgtattctttgatccttgcacgttttacttccttgatatcctttaccacatccaggttgatgccattgggatcatagatgtagccgttggaatcattcatggccacaacctttgctccaagctgggtcagcttttcagtggcatagatggcaacgtttccggaaccggtgacaactgcggtttttccttccggagaatctgcgtgtgctttcatgatctcattgagcatgtacacaactccgtagccagtagcctgggtacgaatgagagaaccgccgtaggtaaggccttttccggtgagcacgccttcgtacagaccacggatgcgtttgtactgtccgaagagataaccaatctcacggccgcccacaccgatatcaccagcaggtacatctgtgtcagccccaatgtatttggaaagctcagtcataaagctctggcagaaggccataacctctctgtcagacttgcccttggggtcaaagttggaaccgcccttgccgccgccgatgggaagcccggtgagagaatttttgaaaatctgttcaaatccaaggaatttaagaatgctctggtttacggacggatggaagcgaagacctcctttatatggtccgatcgcactgttaaactgtacacggtaacctttgttcacctgtacgtttcccttgtcatcaacccagggtacgcggaaggaaataattcgttccggttctaccagacgctctaagatagaaagtctgcggtattcttctttgtttttgtcgatgactactttcagggagtccaggacttccttgactgcctgatggaattctggttcgtttgggttctgggctacgactctttcgtagacttcatcagtataagacataataattcctcctcatccataaacgtttcgctttttcagggctattatacactaaagtgctaaaaaagaaaagagcgctcgaaaaaaaaattccagcttgtgaaattttcctgataaattgccatgcaaataggacaaacaacgacagattacacacaaaatatacttgcgcaagtgacgtgaatatgagattatataaaaagctacctaaaacaggagcaatatacaaagagggggaattaagagtatgagtgaaaaaacaacaaaggggcgggcggctgcgcttcttcccattgcagtatttttagtcatctttcttggctcaggatttatcactggagatttctacagcatgcctgcgatcatgggatttctcatcgcacttttcgtggcctttctccaggaccggaaccacaactttaatgaaaaaatacatatcatcgctcagggcgtgggggatgacaatattataaccatgtgcctgatctttctggccgccggcggcttttccggggcagtgacagcggcgggcggcgcggagagtaccgtaaatctgggattgtccatccttccttccggtgcggcagtggtaggcctgttcattatcggatgctttatctctgtgtctatgggaacctccatggggaccatatcggttcttgcccccattgcggtggggatcagccagaagaccggatacgccatgggaatctgtatcggggcagtggtgtgcggcgccatgttcggggacaacctgtccatgatctctgataccaccattgcggcagtaaagacccaggggtgtgagatgaaggataagtttaaggagaactttctcattgttcttccggcagccattgttacgatcattatttttatggtgcttaccagaaacggcagctatgagctgaccgacgagctgacctacagcctttggaaggtgcttccttatctggtagtgctcattggcgctcttattggttttaatgtatttcttgtgcttattgcaggcacggtgctgtctctgatcgtgggcgtatcttttggctccattgcccttggtgatatattcaaggtagtggcctcaggccctgacggtggcggcggaattatgggaatgtatgacattaccgtgatctccattgtggtggcctgcattgtatcccttgtaaaagaaatgggcggcattcagttcatcttggactttatcaaaagacatatcagcggcaaaaaaggcggagaactgggaattgccatcctggcccttttagtggacatgtgtactgcaaacaataccgttgccattgttatggcaggacctattgccaaggagatcagcaatgattttgacattagtccaaggcgctccgcgtctctgctggacatgtttacctctgtgggacagggactgatcccctatggggcccagcttttgtccgcggcgaccctgaccgggctcactccttacgggataattccttattgcttttatccaattttgatggcagtaagtggattgatatttatattatttgtgaaaaacagaaaggtgggaaagtaaaatgaaaacatttgagaaatccagcaagctggacaacgtgttgtatgacgtaagaggaccggtggtggaagaagcggcgagaatggaagaagacgggatggagattctcaaattaaacattggaaatccttatccctttggttttaccgcaccccaggaggtcatattggacatgctcagcaacgtccgttcctcccaggggtattcagattccaagggtattttctctgcaagaaaagccattatgcagtatacccagcttcgcaatattcctggtgttaccatgaatgatatctatacaggaaacggtgtcagtgagctgatcaatctgtgtatgcaggccttattaaacgatggagatgagattctcattccggcgccggactatcctctgtggacagccacggcaactctggcaggagggaaagtggtccattatatttgcgatgagcagtctgagtggtatccggatatgaacgatatccgcagcaagatcaccgaccgcacaaaggccattgtcattatcaatcccaacaatcccacaggggccgtataccccaaagaggtactggaagagctggtgaaaattgccagtgaaaacgagctcatcatctttgcagacgagatctatgaccgccttgtgatggatgattgggagcatgtttccattgcctctctggctccaagcgatgtgttctgcgtgaccttttccggactttccaagtcccatatggtggctggattccgcatcggctggatggtattaagcggtaacaaaaagaaggctgcagggttcattgaggggatcaatatgctgtctaacatgcgtctgtgctccaatgtcccggcccagtccattgtacagacagccctgggtggataccaaagcgtgaatgaatatatcattcccgggggacgcatctatgaacagagggactacatttataaggcactcacggacattcccggtattactgccgtgaagcccaaggcggccttttacatcttccccaaggttgatacagagaagtttaatattgtagatgatgaacgcttcgccctggatttcctccatgaaaaacaggtgctgatcgttcctggaaaaggctttaactggggaaatccagaccacttccgcatcgtatttctgcccagtgttcttcagcttcagaaggctgtgggcaagctggcagatttcctggacggctatcatcagaaggcatgaaaaaagtaagggacagaatcaaggatgatgtgaaaaaagcttggaaaccggtgcttcttgtggccggtttccttgctcttgtgcaggcggcgggaggcggtttctgtccctttcgaaggtttacaggcctgccctgtcccgcctgcggcatgagccgggcccttgtactgctctttacaggagattttcagggagcatggcagatgcatccctttgtgtttgcggctgccggatacggtattttatggctgggaattcggtatttcaaaggaagctttccccgttggctgaagcttttgggatggctgcttttggtgttgtgtgtctgctattacctatggagaatgaaaaatttctttcctgaaaaagagcctatgatttattatgaaaactcagttctgggcagagttctgaattttggaagtaaatagtctgaattatttgcagatgaaatttaaattttacgttatagaccaaaaagaaaaaaaatgatataatcgtctcatggcagaacggttaggagcaaaaagttagggaaattaccgtaaccgtttgatttaacaaaacaattcatcaagtatgaagaagaggaggggcttccgaaaaagaagatgaaatcttaaagcagaaaggggtaattagttatgtcaggatttaacatgaaagtaacaccggaaatggaaaggcttacagatatttgtactgcccacagcagtatggatgtaagtctgtacggaaagtatgacgtaaaaagaggcctgcgcgacctgaacggcaaaggtgtattggcaggattaactcaggtatccaacatccaggcaacaaagatggaggatggaaaagaggttccctgtgaaggaaagctggcttacagaggatacgatatcaaagagcttacgtcaggatttttgaaagaaggcagattcggatttgaagaggttacatatctgctgatctttggggttctgcccaatgcatcagaattaaaggctttccataagcttctggccaaccagcgctctcttcccagaaatttcgtccgggatgtcattatgaaggcaccgtctcaggatattatgaatgctctgtccagaagtgtgctcacactgtactgctatgacagcaatcccgatgatatttctctgcccaatgtgctgcgtcagtgtctcaatctgatcagtgtatttcctatgctttccgtctatggataccaggcttacagccattatgtaaagggtaagagtctgtatatccacaatcccaagaaggaactttccacagcagaaaatattctccgtatgctgcgtcccgataagagctatacacctttggaagctcagattctggatctggccctggttatccacatggaacacggcggcggcaataactctaccttcaccacccatgtggtatcttcctccggaactgacacctattcagccattgccgcagccctgggctctttgaagggacctaagcacggcggtgccaacattaaggttgtcagtatgtttgatgatatgaagcgggaagtgaaagactgggaggatgaagaccaggtaaaagattatctgaagagactgttgaacagggaagcctttgacagaagaggactgatctatggaatgggccatgcggtatattccgtcagtgacccccgtgcagaggtattcaaaggactggtggagcgtctggccaaggaaaagggccgtatgaaggactacaatctgtactccatcgtggcccgtctggctccggaagtgatcggagaagagaggaagatctacaagggcgtcagcgccaacgtggatttctacagtgggtttgtgtacagcatgctgaacctccctctggagctatatacaccaatgtttgccattgcccgtattgtgggctggagcgcacaccgtatggaagagctcatcaacacggataaaattatccgtccggcgtataaaaacgtgctgccggacgcagaatataggccattatcagaacgttaaagggagcagaaaaaatggcagaatacgtgaaagcaggactgatcctggagggcggagccaacagagggatttttacagccggagtgctggattatcttatggaacaagagtattacctgacttatgtggccggagtttcagcaggcgcctgcaatgccgtggattatttgtcacgccagaacggaagaaccaagaaatgtatgatgccccaggcaaaggaataccgctatatgagcctgagaggggcaatcaaaaacaagagtctcttcgatatggacatgatttttgaccgctatccaaatgaggtttatccttttgatttcgacacctattttcagtcacccttgcggtgtcagctggtagtcaccaactgcgagaccggccgggcggagtatctggaggaaacagcggatcccaagcggctgatgaacatctgccgggcatccagcagtcttcctatggccagtcccatggtgaacatagatggcggctggtatctggacggagggatcgcagattccatcccgctgcttcactccatgaagctgggctatcggaaaaatgtggtggtcttaaccagaaattacggctacagaaagaaaaagccaggaaagagcaaggtggtctatgagacggctctcagggagtaccccaatctggtgcgaacgcttttgaaccgggcacaatgctacaaccgcacggtggaactaattgaaaagtgggaaaaagagggccatatttttgtaatccggccggagataaaaccggtatccagaacagagacagatggttctgtcctggaagaattttatgaccatggatatgaagtgatgaagcactgctttggcgccatgaaagtatttcttgaaaaataatcaataaaggaaaacgagatgtttaattgcttttttccggacgaatgtgcggattccacctatgagatcgattttgaaaaattatttgcccagggctatcggggagttctctttgatattgacaacaccctggtgccccatggggcgccggcagaccggcgggccattgaattttttgaaggtctgcgcaagatgggatttcagtattgttttctgtctaacaaccagaaggagagagtggctccttttgcaaatgcggtacagggactgtacattgaggacgcccataagccctctaccagaaattatcaaaaaggcatggagctgatgggaacgaacaaaagcaacacccttttcgtgggagaccagctttttacggatgtgtacggagccaagagaaccggtatccggaacattctggtaaagcccattcatcccaaggaggaaatacagattgtgctgaagcgttatctggagaaggtggtcttatatttttacaaaaaagaggaggggcattcatgaaccatatcgttatgattggatttatgggatctggaaaaacaagggtgggcaagcgggtagcccaggatttgggcctgccgtttgtggatattgacaaggcgattgtgaagaatatgaaaatgtcggtgaaggaaatctacgagcgattcggagaacccttttaccgtgctctggagaccaggactgtgaaagagcttctggagatcccagatcagatggtggtatcggtaggcgccggacttcctctgcaggaacagaatgaaaagtatatgaaaaagctgggaaccatcgtttatctcaaaggttcctttgaaaccctgtggaagcgcattgagagctctaatccaggggatcagcaggaggaacgaatgaaaaagcttctggcacagagagacccgatctatgcaggatttgcagatattgtggcagtgacgggagttaagccctttgaaggtctggtggaagaaattgaagaaaaactaaagtcggctgcaaaaaacagttgaaaaatagttccagttattatagaatgtttcgtagtgaactgcacaataaggaggaaatagaattatgatttcagcaggtgatttcaaaaacggtatcacacttgaaattgacggcaacgtttgtcagatcgttgagttccagcatgtaaaaccaggaaaaggcgcagcctttgtaagaaccaaatacaaaaatattattacaggtgccgtactggagaaatccttccgtcccaccgaaaaattccctgcagcccgcattgagcgtgtagatatgcagtatctgtataacgacggagaattgttctattttatgaatacagaaacctttgaccaggtgggcttaaaccaggattcagtaggcgataccctgaaatttgtaaaagagaatgaaatggttaagatctgttctcataacggcaatgtatttgccattgagccgcctctcttcgtagagctggagattacagagacagagccaggctttgccggaaataccgcacagggtgcaacaaaacctgcaaccgttgagactggtgcacagattcaggttcccctgtttgtgaaccagggtgacaaggttaagattgataccagaacaggtgattatctgtcacgtgtataagtcctttctttgtaccagatgcttttttcacacaagcacatcagaagaacattcgctgccggcagaattctgccggcggtatttctaaatagagaactgcctccaaatgtgctgactggggcagcttttcttcccttaggggtatcttatcttcttttttcttttatttatcattcccggaagaacttcggggatctcaccgatacaattaccaaagaaaaacttaaaaagtgggggatatgccgtaaattgttccgtgaattaaacggcttgtcccaaaatcgcgaatttttcatagggaaaccatgaaaaataaaaattatgaaagggtgattgtatgaaaatcccaaaaacagaaatcacataccagctgcgaaattatgaaaaaaacagagaatggctggagcagattccccatgtgccatatttggacctggccattattttctgcttccagaagccctgccaggacggggaagaagaaagtctgtgcctggtcaccaaccgggaggcagagctgtggaacatggggccaaaggacctggaggctctggcccaggagaacacaaagcgtatattcccgccgattttttatactctggaagagatgatcagccggctctcacagggggaatttcctcttcggcagccgccgggggagggacttcccatgtatgtgctcaccaatgaagagaagctctacggagcttcggcgattctatatccaaagcttttaaagaccatcagcggctggctgaataaggatctttttattcttccaagctccatccatgaatgtattcttatgccggtgtccggcaattatacccagaaagatttagaggccattgtcagagaaattaatgaaacccaggtgccagaggaggaatttctctcgaattatgtatatttttatagcaaaagtggggattttctatcattttaattaagttttttagaagtatttcatcgtaatgctttacatcttccaataaatgtggtatcataaccattgcagaatgattctaaatgtactccatccgttgtgtgagttatccattaatctctgaacgggcatcatggaacaatcatttgtatgcgcctgtagctcagtggatagagcagtggtttccggtaccatgtgcgggggttcgattcccttcaggcgtgtttgccaaggcagagggtgtgcctgggcgccaaacaaaaggaggacaagaacttggatgatttcagagaatggttatcagataaccttcgctacattcttcttggtgcagcggttctgataatcgtattggcattattctttggaatacgtgcttgttctggaaaattgaagggaaattccggaactgacaaagggcagttgacagagaataaccagggaaatgttccttcttctccgacaatgggtggggagactgacgacgagaagaaagacgacgccaatggtctggaaaaggatgcatatccggaagtgaatgcattgatcaaggaatactaccaggcattgggagagaaagacgtcaccactttgcgtacattggtggatgacctggcacctgcggacgaatcgaagattataaatgtgaaggattacatagaaggttatcaggtgaatgaagtatatacgaagaaaggcatcgaggaaggtgactatgtcgtatatgcccgttataattttatatgcaaggggatttcaacgccggttcctgcgctgagtcagctttatgtgcggacagacagtgagggaagcctgaagatttatggcggacagcagtctgacggacaggttgcagcttttacggaacagcttcagagcaaggaagatgtacagcagctcatccagcagacggaacaggattacgaggctgccaaggaaggtgacagcgccttgaaagcattcctggatggattgggagaggatacagacgttccagtacagtccggggacggcactgtgcttgtggcagtagaagagtgtaatgtccgggcgtcagccagcacggacggagatatcatcggcggtctttatactggacaggaagttcagaagactggtgaggacggcgaatggatccagattgaattcaatggccagactgggtatgtccatagcgacttgctccaggaagcacaggagacataacacagaagaaaataaagagcatcaggaagaatttggcgtcataagcgtggattcggacggatgctctttttttgaagcgggcttgccgctttgttatggaaataaaagaaactcacagactgcccaaaacgtttttggctctgtgagtttctttgttctcatttctttttttatcggctcttggatgttctttaaatatcgctgaaatcaggggtaccgtccagatcatagggagtactctggtaaacgtagtaatttagccagttggtataaaggttgttggcgtgggcccgccataaaagcaggggcttattttctgggttgccattgggataataattcaccgggatttcaatgggcagattcctgctcacatcccttttatactctccatccagggtgatccggtcgtattccggatgtcccatgacgaagatcttgcggccctcatcggccattgccagaaacaggccggcctcctgggattcggccagcacggtgagctctttgcaggcatggatgtctgcgatgggaacctctgtatgtctggagtggggtgccagaaaaacgtcatcaaagccccttaccagagggattttccggttcatgaccttgtgccagaacaggccgaacattttcttgtccagctttttcttctggaggccgtagtggtggtaaagacctgcctgggctgcccagcacagatagatggttgaggtcacatgggattttgtccagtccatgatctccaccagctcttcccagtaatccacctcctcaaactccataagctccacaggggctccggtgatgatcatgccgtcaaatttttgactttttacttctgcaaaggtctgatagaacttgtttaaatggctcatggaagtgttttttgattcatggctttccacagtcagaaaggtcacatcgatctgaaggggggtgttggacagagagcgcagaagctgaagctcggtctcctccttcaggggcatcaggtttaagatggcgatctggatggggcggatatcctgatgcatggcccggttctcgtccatcacaaaaatgttttccttttccaggatttcttttactggcaggttgctttgaatttttactggcatttgtctttcttcctcccttattcctcagtcattctcaggaaatcctcttcagacagaatgggaattcccagttcttttgcttttttatttttggatgaattggaagtggtatcattgttgatgagataatttgtcttcttggtcacagagccggtcacctttccccccagggattcaatgaattccttcatttccccccggttggcaaaccgctccacacttcctgtgatcacaaaggtgagcccctggaatttctgctcaccggaaatttcttctttctccagcgccaggtggctcatcaggtgggccagacgctttaaattgtcttcttttcggaaatattctgcaatgctgccggccagcacggggccgatgccatcaatggcactgagctcttcctcatccgcttctttgatcttttccagatcctggtcaaactgacggcagatgatcttggcattggccaggccgatccctgggatccccaggctgtagaccaccttgggcagggtggtgtgccttgccttttccaaactgtccataaggttgtcaaaggacttctggccaaagccatccatgtgcacaatctcttctttgtattttccaatctcaaaaatatccccaaaatcatggataaagccgtggccaatgaatttttccagggtggcctcagacagaccgtcaatgttcatggcgtctctgctggcaaaaagggcaaaggccttgatgcgcttggcagggcactggggatttaggcagtacagggactctacatcgttttcctgttttattttagcctcctggccacaggcggggcaggtatccggaatttccagatcatcgcttttggtaaggttttccgcgatctggggtatgatcatattggctttatataccttgatagtatctcctatgcccagcttcagatccttcaaaatactgatgttgtgtacactggcacggctgaccgtggttccctcaagctccacaggctggaagatcgccactgggttgataagtcctgttctggaaggactccactccatttccagaagcctggtctccttcatctcatccgcccatttaaaggcaaaagcatttctgggaaactttgaagtgcttcccagggaatcgccgtaggcaatgtcgtcatacagagccaccaggccgtcggatggaaaatcattggtctgcacagcctgggaaaaatattccatggcttcatccagggtttcccctgtgactgtgcggtattccaccacctcaaagccctgttccttcagccacaggaattggttttctctggaattggcaaaatcaactccctgggcgctcaccagggaaaaggcgtaaaaccgcacatttctctgggcggtcacctgattgttcagctggcgtactgagccgctgcacagatttctgggattcttgtatttggcgtccacatcttctatggtgtcattgatcttctgaaaatctgagtaagtgataatagcctcaccccggagcaccagtcttccctggaagggaatctgaagggggatatttttaaacacccgggcattgttggtgatcacttctccaattgccccgtttcctctggttaccgctttgttcagacttccgttatcataggtaagtacaatggtcaggccgtccagcttccaggataaaagggtcttgtggggcccgatgaactcccggagggtctctacctccttggtcttatccagagagagcatggtggtttcgtgggcctccttgggaagctcgtcaacagcctcgtatcccacggtgagcgtggggcttcccgccaggacggttccggtttccttttccagggcggccagctggtcgtacagctgatcgtactcctggttgctcatgatctccctgtcctcttgataataggcttttgccgcctgattgagccgttctgtgagttccttcatttgtttcagagcggttgtgtccatgttgtcctcctgtttctgtcactgtttgattggatgaatgggcaatggcctccatcaggtcctcccactcttcctttgtggcctcccggtatccgccccggggcaggtcacccagatgaaaattcattatgcggactctctttaattctttcacctggtatccaaaatattcgcacatgcgccgtatctgccggtttagtccctgggtgagaataatgcggaaagaatattggcccgtcctttctgccgggcagggtctggtgacggtccccaggatgggaacgcccgcccgcattccttccaaaaactctctggtcacaggcttgtccacggtgaccagatattccttctcatggtaattgccggcccgcatgatcttattgatcatgtcaccacagttggtgagcagaagcaggccctcggattctttgtccagcctgcccacataggtcacccgcactgggtagcggagatattcctccacgtttacctggccctttcgtttttctgccgtacagactactcctctgggcttatagaaaagcagcagcacctgtttctcctggggctttacaggcttattgtccacagtgatgtgctgggagagattcacctgctgtccggtctgggcctgtctgccgtccaccaaaacccggccgctttcaatgagtctgtccgcctctcttctggagcagacaccggcttcacttaagtatttatttaatctgatcgtcttgatttcattcatttttccattatattctttttttgccgggctgtaaagacagttctctttcgcaaaattcccctgtgggaaaacataaaaaaagtctaaaaagggatttctctattgtgttttttcctttttcaaggtattatgaagaggaaattaataacattctggggagaatgaaacgtaatttgcacaaagggggaaaagagtatgcccagcaagaaaaaacgtactaatcggctgctcattcttatctgtgtatttctctgtctgcttttcggagccactttaacacagtcctcacccagggttgtggagttttctgacgatacccagtcagatgtgatcgttgcggacagtgtaaccgatgccggtttttcagcagaagaccagagtgagaaccaggatctttttcaggaggagtcccaggctgaaccacaggccagtcccacaagcacacccaaaccagagcctgacaagaacgcttctccggaggcggccaagggacagtgggtggctgatggagataactggcgctttgacgtggacggtgttcctcatataggctggcttcgggatacagacggacatacctatttctttaataagaaaggttatatgcagaccggatggctgaacaataatggaaagcggtattattttgatgaagacggcattatgcagaccggggaggttcccattgaaggaaaggtctatcttttcctggaggacggttctctggacggttacgcaaagcccactccagcgcccaccaaagcgccggatcctacacccacgccaactccagcgccttttaaggcggaggttctggcaaacggagagaagccttcagtagccctcacctttgatgatggaccgggcgcatatgcagaccgcattttagactgtcttgaggaatacaatgccaaagcaaccttttttatgatcggggaacagatttccaatttcccggatcaggtgaaacgcatggatgccctgggctgtgagctggggaatcataccttccaccataagaacctgactaagctcactccagaagagatctctgatgaaatcggcaagacggacaaggtgcttctggatctggtgggacatggtgccactgtacttcggccgccttacggtgccattgacgacaatgtgactgttgcagtgggaacacctatggtgctctggtccattgatactttggactgggaaaccaaaaatgtggaccagacggtacaggcagtggttgacagtgtgcaggacggctccataatcctcatgcatgagatctatgaggagagcgcccaggctgcggagattttaatcccaaagcttgtggatgcaggttatgacctggtgacggtccacgaactggcccagcgccacggagcggagctgcagacgggaattgcttatggcgaactgagatatgaatagagctacataaatacaatgccattgcggccagtccttttaggggctggccctttttctgccataaataagaaaaggaatccgttggatcagctacttttagtgaacattgggtgcccctgatcatagacagcagacagccgtgattgtgttatgctgtgggaagtgtcaagaaagggaaggaaagaattgacaattgacaaaaaaggataaatgtaatacaattgtattacataaaggaggcgatgaaatggcaaaagaggcaacactgcaagtccgtatggatgcagatttaaaagaaaaggcagaggaattatatagggatatgggaacgtcttttgcagaggcagtgcggatttttgccagacagagtgttttggaaaacggtatgcctttcgttattaccgccaacagaacaaacacttatggcagactttccagatatgcacaagcaggacggatgaaagaggaaaacggtgcttttgaaagggcgatgctggagaagtatgaacaaattgattgatgcaaatgtaattttgcgttatttattggatgataacgcaaagatgtcagaggtggcaaaagaggtcatagagcaagtagcttttacccttccggaggtcatagcagaagtggtctatgttttgaaaggtgtttatgaagtagagcgaaaagagatagctgacacgttgatcgaatttttaaaggaaatagaaattgattaccaggaagtcatgtgcgaggcgctaggactgtatggagatacttctcttgattttgtggactgcatacttattggccgtcataggattctggaggatgaagtagtaagttttgataggaaactaaataaaatgctcagttgacagcatatgaggcgctctgtattggaaggtacaggaagtctttttatgccaagggtataaccctgtgtccattgaaagctctcttaaatcagctggaatcccggatagaaaggtattatgggaaaaacgacaatacaggaaagaaagtgacagtcaagtagttttagatagatcacatgattttctttgaattttttaaagttctggaaagatttcacagtttgttcataactggttcacaaaaaagcgtgtataatatattttagttgcgggtgtagatcacccgtggccggaggatagatttgtaaccattttttgtggagaaaggtactgggtaatgagaaaaaaatcacatatattgttggcaaggtatctggctgatcaaatgccggtagccgagagtcttcagtgtcacagaaaggcattctgcttggggagcattctgccggatattaaaccgtccttcctgacggagagacacgagttcacaggaacgttccaggagatacaggagaagatccgcaggcttaccacggagctggctccctctgtgaatgtgaacgagagggtttactggagaaggtttggagaagtaatgcactatattgcagattactttacatttccacacaataagacttatcaaggtaccttgtacgagcacaacaaatatgagaaactgttgaaaaacgacctgaagcgttatattaaaagcggtcaggcaggtatccatgcccgccatgcactgaactttgacagcgttcaggatctgaccgagttcatttcagccagccacaagatttatctggcaaaggaaagaaatgtcccggaagatatcgaatttattttaaccgtatgtttccaggtgatccagggaatgttccagcttctcacgaaaagccagaagcttcaagagacagattcttatacctggagtttagcagttcaataaaagcttacagggccttccgtacaaaagcggagggccttctttgcataactggaaaattctgttggatttcctgattatacattacaccgcacaggtttcttaccttataaagcacaggggcatttccaatttacagaaggctgtttttggcaagccagggctgtgaatgtgtatgcgaacaaacctggcggttgattttggaggattcttgtgctacaataagcccagtagtttatgcgaggagttatatagacagacctttatataggggagtaaagggatgttcgacggaagaagggagcatcttaatatatgaaaaataagtatctgaccaagctgttatgtataagtttggcttctgcaatggtcctgcccagtacggtcatggctgctggagaagaggaaactgctgcatatgcgtcagaatttggagatgatttagcttttggctctgagacaccaaccatcccagacgaatcacctattatcacaccggatgcatccataggaacgccagaagcgcctattgagacacctgtgccaaatcccacggacccgcctgttgagactccggtaccggagcccacggacccgcccgttgagacacctataccaccggaaactgaccttacaccaacaccaggcgtgacgccaattccagatccggatgtgacaccattaccatctccggaacctgaccttacacctacgcctgatgtgacgcctgttccgggagatgtaacccaggaagcgcagggagtcatcaatctgatcagcaccattaagctggaggagcttaccaaggaagacaagtcattcattcagaatgtccgcttcagctatgagcagctcagcgatgacgagaaggccaccgttgtgaattatgatgtgctggtggaggcagagcagattatgatggctctggatccggactttacacccacaccggagccctcacctacgcctacgccgtctccaacaccaacacccataccatcgggaacacccacgccggataatccttttgatgacggcaaggaggatgattttggggatgacaaggcggacggcaataccatcgatgtgcagacaagtgcaccggtctattataccaatatggtatccaacatccatgcaggcaaggaattctacctggattctctgaaagaaaattacggtctggaattttccaatgattttgcagatgtgatggaggaaattgagagggaatataagtcggccaataagctgacagatgaaagtgatagaaatggaagcggagtgaccacttccaaggatacgctgcttgtgcgcaactggcaggatatcctggctatttatgtatatgaagagaagcagtccaatccaagcctgcagacctttgagatcaacagaggagccaagagccgccttggggagatttttgcagagatgaatcccgttgtcagggacaaggaagtcattacaaaggtttactacggtgatctgcatatcaatgattacataaaaaagaataacgttccaaaagaggacaggcagtttctgaaaaaatatctggagacggactgtaagcttttgtgcgctgttgtcacagccagcccgggatttgtccgggagagcgtgggagaaggtgtatcagaggagcgtgtgaatgtaattgccgctgcctacaccttggtaggtaagattggttatttctggggcggcaaatccaatgccatcggcatggacccatcctggggaacagcagccaagattgaggcagagggaagcagtgatacaggcgcagtgaaggcctatggcctggactgcagtggttttgtcacctgggcagtgatcaatggctatgaagatcaggccatggaaggcgtggtgggccatggaaccacatctcagtgggtgcaggcccaggtagtcggcgagtcagaagcccagccaggtgattttgtgttcttgagaggaccagagggcggcagtgataaccatgtgggaatcatctgcggccagacagacactggtgactggatcgctgtccactgttctgcaagtgccaacggcgtcactgtaggcgaggcttatggagcgggattccgctatatccggcaaccctccttttatccaagccaggcagagctgaaccagcttatgactgagaagggaaccagcggccttaattcgattgatgacaataccctgcaggctttgctggagcaggagagcgagattcaagagacagatcaggaagatcagatcagtccttttacagagccttcggttattccccaggaaagtacaggaagcaccacggtcacaggcggttctgtgcgtacctattcagaagaagaggaagagcagcagccccaggagcagcctgcccaggaggccacggcagtttttgcaggagaagaacaggcagggcctttggaagcagaatttacttatcccagctttcagccggaagctgcttatatggaaattgccttcagcacagagggagccaaagtggttacctttgcagagggagaataagaaggatatttacaggaggcggcgtttttgccgcctccttaatttctcttgacaagtaagagaaaagcacctatactatgtcatatatagtttgataatcaaaatatttgaagatagaaataggtgaaggatatgagtacaacaggaattataggcacaggaagcgctcttcctcaggcaattgtaaccaacgacgatctggcacagatcatggataccagtgatgaatggatccgcaccagaacaggcatctgtgagcgcaggctggcctcgaaagaggagtccgccgcagcattggcggcccgggcaggacgagaggctttggaggaggcaggcatggctcctgaggaagtggagctggtcctggtggctacctgctcttcggaaaattattttccaagtgtgggctgctgtgtgtgccatgagctgggccttgtgaatgccgcagcaatggatttaagcgcggcctgctcgggttttgtgttcgcccttcatacagcccacgcctatattatgagccgaatttatgaaaatgcgctggtgatcggcgcagagaccttttcccagatcatggactggaaggacagaagcacctgtgtgctctttggagacggtgcgggagcctgcgtggtaaaaaaacaggagaatggaatcctggctttttcccagcacagtgatggaagccaggggcatgtgctcactgccagcgcccccagaatgggcacaccggtgagtgaatacagggaggcagagcctgtggccatggatggacagggagttttccggttcgcggtaaagaccatgccagactgtattgagaagctcctggctaagtccggcacagaggcggatgaggtgaaatactttattctccaccaggccaacagccggatccttcagtcagtggccaagcgtctccatgtgtcacaggagaaatttcccatgaatctggataaatgcggcaatacttcagccgccagtattcccatccttctagatgagctgaataaaaaaggaatgctggaaaaaggagacaagctggtgctggcaggcttcggagccggcctcacctggggagctactttgcttactttttaaagatctataagaacaggccgggaatcggagaaaaaccagattcccggcctgttttatgttttataggatcctttgaagataccatagatgcggcccttgaagcacagggcaccttaatggtatccaccctttgattcttgcgttttggccccatgtgagaggcatatgctatctatgtatgccagaaagcacttcctcaatccacatattggtgctgtatccttcctcgaagaggcgtacgatcaccccatagggctctgcatcactggaaaaggcgttggcctcgtccgtatccacgtgcatggccagacggaaagagcggtctacacgcaccaccacgtctgcatagatcaaggtcctgccatagcttttcgtgaggacaaaaacctcgtcattgtccttcacccgcagggaaagagcatcatcaggcgtcatatggatgtggcgtttggctacgatcacgccccggggaatatccagggaaatcccctcttgtgtatataaagtgcagccaggcgtgtcctccacatctccggactggcggatcactcctggaatacccagcttcctggtatcggtaagggaaagctctacctgggtctccttgcggaaaggccccagaatggccacattctggaaatctccctttggccctttgatggaaagtctctcctggcacagatactggcccggctggcttagttcttttataaaatgaagttctgccccttctccgaataaaatctggaaatccttcctggatacatgaatgtggcgggcagatgtttcaatgggtattttcacgctcatagtattgatcccttgtgtttttttctatacaacagtgtagaacaggaaagaaaaaatatcaactcttttcttattggaaaaaggctgttagaataatggaagcgcctgcagcttctggaaagaatcagcaggttgtaagaacaatttgctatactcccgttttttcggtataatggaaggcggatgacagaactaaaaactggagtaagacaatctatgaagaaaaaacacacaatattggcggcagtgtgtgccggagccctgatttttgcagggctggctgtgggagaccgcctggaaggcgcctgggaccgcatatctgagggtgtggcctatgtggtcaccagagaacccggggaggtgcgccggctgcgggagctggaggtagcccaggaggacgagggctgttacgaatactatttccagcagctcagtgaacaggaacagcgaatatacagagagattttaaaagggatccgctctctagagagacggttttatctgtccagtgctgacggaagcctggtggacagagcctaccatgccctccttcgggaccatccggatatcttttgggtacataacagagaattggtgtataagaccacctacggaacttataccgtctttgagccaggatacagctataccgatgaccagatccgggaggggatcacccaggctgaaaatgcctggcagcaggcagcttccctgatctctccggagtgggacgattatgagaaggtgcgggctgtgtatacctgggtgatccagaacacggattatgtgacaactcccgcagaccaaaatattcagggggtttttggagacggacaggcagtgtgtgccggctatgcgggggctgtacagtacctgctgaacaagctggggattccctgtgtgtatgtggcaggccagtctcagactgccactgccggggacggaggccatgcctggaatgtggtgaacatttccggaagctggtactacgtggacgctaccaatggcgaccagcccaacttttttaaacggtcaggggaggatgcggcagatgaaagtctggtcctctatgactatctgtgccccttccctgaggactacgagaaggtgagccagccagaccaagagttcgaagtgccctcctgcacggcagtggacatgaacagctatgtgagaaacgggggctgcttttcttattacgattttcaggatgtatatgactatgcgtccatggctctgcaaaagggcgagactattatacctatcaaatttacggatcagcaggagttccagagggctaaggaggaattcattgaaggcaagaggattcaggaggtggccatgtattacatggaccttcagggtctgtctgagaccaggtaccattacggcctgctggatgagctggaaactatttatatgatgttttaaggaggcggtgcacatgcttacagaaatattagaaaaattggaacgggttgccgataagctggaaaatcccctgacccagaccatggaaatggcagctatgatcttattctgtgcggttctggttgtgggacttttgaacgtgttcctgggctttcggatcatgcggttctggatgatgatcggcggttttgccctgggtggggcagccggtctgtatgcaagctttcagctgaacctggacaaaacccccacattggtcatcacaggacttttggcccttctgtgcgccatcttgtcctttgtggtgtacacctggggaatctttgttttgagcctgtccctgggtgcagggatcagtatttatgtgattcatcccactacatccctgagctttttcctgtgtatgctcattggtgtggggatgggagttctgggagtgaagttttcaaaagagatcattatcgtgggcacctcggttctgggcggcctcatgtcaggaatggccattgcggctttggcagaatgggagcagctccctatgggacttctcataggactggccattgctgccctgggagttttggtgcagtttaagctgaatccggatgatccccaggaggaagaggaacaggaagaaagatctgcagataaggaagaaaatgaataaggttcccagaatgggaagaaaacaatgggctgaaccacaggaacaggcatccaatggaccagcagcaagaagggcagccaatgataagggaagggagaaacagttgcatgttaagtgaggagctggaggaggtccaggcgtttgcagacaagatcctccgaaaatacttttgcgagtcagatatggaatttcttatctccacctttgcgccggacattgtgtggatcggcgggggcgaaaagatgatcgcggaaggcgcccaaaaggtggcggagagcttccggaagggaaaaaaggacgccattgcctgtgatatgtatgatgagagatacattcccaaaaaactgggggaaggccattatctgtgtcagtgtgacagctggcttctctccagaaaggagacgggcatgtatcttcacatccaccagcgctgtaccctgatcttcagaagaaacgcgaagaagctggagaccatccatatccacaattccatgctaaatccagatatccaggatgacgagctgtttccagtacaggcatccaaggaagcctatcagaagctggagaaggttctggcccaaagagagagtcagatagagcttatgctctcccagcttccgggagggcttttgtcctgtaccctggaggaaccgcattttatcctgcgggtccatgaggggatctgtgaggctctgggctacgaaaacccagaggaatttctagaggcagtccagcacagatacaccaacattgtccatccggatgaccggaaacggctgcagacagaggtggcggctgccctggctgcaggagaatcctattatgcggagtatcgggtgagagccagggacggacacattctgtgggtagcggattttggaaagcaggtaagtgacaacagccagaatcagccctatctaaactgcttcatcacggatatcagcaagcgcaaggagcgggagctggagatggagcggatcagcacagagaccaggcagcaggccagattcctgtcccagctttatgattctgttccctgcggcatccttcagttttccacagagtcctcccatgagataggaatcgtaaatcccatggtgtggcagttctacggttttgaatcagaggagcaataccgggctgtggtgcgcaatcccttccagcttgtgcttccccaggaacgccgggccctggaggaaaagatcagcgctctggtgctggacggaccgcccctcacctatacaaggcaggccaggaaaaaggacggaaccccggtgtggctcagcgttgccatgcaaagaattgtcaacgccaacggcaaggaggtgtaccaggcagttttcacagatgtgacagccatcaagacactccagaaggctcaggaggatgccaggatcctggaaaataccctcctgcgcacagccatctgcacagcctaccccatgatcctcagcgtaaatctcaccaaggattcctataactgctttattcacgagcaaggtaccggaccactgagccagcgccagggttcctattctaagatggtgcagtggggcttgtcaaagacctaccccacctatcggaaggactatgaaaacaccttcttcattgaccgggtgctggagcagtttcagagaggcaaccgggaaatttatctggaatttcagcagctggggaaggatcataattatcattgggtgtccattcagctcattcatgtggacaatccagtgggccaggatgtgatcgccatcatgctggtgaagagtctggatgatatacgggctgagaaggcccgccaggagcagcttcttagggatgccctggctgtggcagagtctgccaacagggccaagtcggatttcctgtcccggatgagccacgatatccgtacacccatgaatgctatcatcggcatgagcgccattggacaactgaagctggacgaccctcaccgggtgagagacagcttccagaaaatcgacgcctcctccagatacctgctgtccctcatcaacgacattctggacatgtccaagatcgagaccgggaaaatccaattgtccaggaaccggttcgacctgacagagatgatcagtgaaatgaacaccattattttcccccaggcacaggagagaggaatcctcttcgagatccatcatcaggagcctttggagagattttatcagggagatgtgctgcgcctgaagcagattatgatgaaccttctgtcaaatgcagtgaaatttaccccagagggcggcagcatcacagtgggaatccgggagctgcgaaggaccaacggttatgcctatatggaatttcaggtggcagatacaggcattggaatgtctcaggctttcatgaagcggatcttcatgccctttgagcaggagtccggggagatcgccaggaacaatgtgggcagcggccttggccttgccattgtgtacaaccttgtccagcttatgaacggagagattcaggtggaaagccgccagggagagggaagctgtttcactgtggctcttcctctggagctggtgtataaggacgaatccagggagcttcagcggaagtccagagagcttcttaaggacatccaggtgatggtagtggacgatgaccctcttatcggagagcagacggcccagatcttaggagagatcggagccaaaagcctgtgggtgggttctggaagacaggccgtggatctggtgcggcagggcttgagccagggattgatttataatattattatgatcgactggcgtatgccggacatggacggtgtggagaccaccagagagatccgaaagctggtggggccagataccaccattatcatcatctccgcttatgactggagctccattgagctggaggcaagacaggcaggtgcttcctgctttatctcaaagcccctgtttcgctccacggtctatgataccttcctgaatctgggcattgaaaaggaaaccgatacctaccaggttcaggctgccgacaggaaaaacagtcattttaaggtgctgctggcagaagacaatgtgctgaacctggagatcgcccagacccttttggaaatgaacgggtaccaggtggaaactgcccagaacggcaagattgcagtggaaaaatatctgtcctcccccagaggtacctatctggccatcctcatggatatccgcatgcctgttatggacggcctggaggctacccgccgggtgcgcacctgcggcagagaggatgcccggacaattcctattttggccatgacagccaatgcctttgaggaagataaagccattgccatggaggcgggaatttccgactatctggtgaaacctttggatatgagtcttttgctgggcaaattagaagggatcaaaaaataaaattatagataaattaggtaaaaaagtactaaaatgtggcaaaagatcggaaaaacgcatattttacgcatatttattttgcacaatcagatttttattttgcataatagtgaaaaatgactaatggacaacttgttaatttgtacaaaaagtgatacaataatgcaaggattattgagcaaatattgacaggttgttatgaaaataaatagatgcggcagagtgtgtataaatcctgaattgccaccaacgaaaaaacggaaggggagattcccatggctttaagacgagagaggatgcgtcttggcgatattcttgtgaaacagaacgtccttacagaggaagacctgcgaaaggcccttgccctgcagaagggaagcggcaagaaaatcggtgaagtgctggttgacgaaggatttatcacagaagaattgatcacaagggccctgcagatgcagctgggcctgaaagtcgttaccctgacaggggtgaccattccaaaagaagtgagaaatctggtcagcgtggacctgctgaagaaatacgtggtggtgccctttgagctggatccttacaatgcaaatatcctgcatttggctatggcagatcccatggatatggcagccattgatgatatctccattgtgaccaatctccaggtggagccctatattgcctcctccagggaaatcctggcagccttggaccggtgttatggggccaaggagacgttgaatgcggcgaagaggtttacccaggagcgggcgctccttcgagggggagatgacgatgatacactggatgcagatgtaagcgatgcccccattgtacagctagtgcgttccctcattgaacaggcagtgcgccagagagctagtgatatccacattgaagcattagagaaaaacattcgggtgcgttataggattgacggcgccctttttgaaaaaatggtatatgacaattcccttctccctgccatttccgcccgtatcaagctgatgggcggtatggacatatcagagaagagaaaacctcaggacgggcgtatgggcatcgtggtggacagacaggaatatgatatccgtatttcttccatccccacagtccacggtgaaaagatcgttatgcgtctgtcttctaagctgggacttacaaaggataagaaagagctgggatttgatacggaggagctggagcgctttgaccggatgctcagccacccctttggaataattttcgtaacaggacccactggaagcggtaaatccacaaccctgtacacggccttgtcagagctgaacaaggaaagcgtgaacattgttaccgttgaggaccctgtggaggcagatattgaagggattaatcagattcaggtaaatgcaaaggtggatgtaacctttgcctcagccctgcgttccatactccgtcaggacccggatattattatgatcggtgagatccgagacccggagaccgccagcattgccgttcaggcgtccatcaccggacatttggtggtgtccaccctgcatacaaacaatgcagtgggaaccctggaccgtatggcagatatgggcgtggagcggtatctgatcgcagactctgtggtgggagtgatcgcacagcggcttgtgagaaaactgtgtccacattgtaaacaggaaagaccagccacagtggaagaaaagcgtctcatgaaaatagatgagaaggaagaagtgaaaatcttcgagcccaagggctgtgatctgtgcaaccataccggttatttcggacgaaccggcgttttcgagattatggaggtaaatgacgaaatccgcagactcatcgcagagaatggtactgccgaggagatgatccgggcagccagagacaacggaatgcagaccctgagagaaaacggggtgcgcagcgtattgagaggcatcacctcctttgaagaaatgataaaggcatcttatgaataactggaaaagagagtgcttatgtatagcttagatgaactattgattcagtcatcacaggaaaaagcgtcggatattcatctgaccgtgggaaaaactccctgctttcgtattgatggggagcttcggccaatccagggagaacggctgaaaccaaaagatatggaggatttggtgtatcctcttttggatgaacggcatagaacagaattagagaggaatggccagacagactttgcttatgccatatccggtgtgggaagattccgtgtgaatgtattccaccaaagaggcaccattgcctgtgttatgcgtatccttcccttcgtgatcccggagccggaggctctgggcattcccagagaggtggtggagctcaccagccgcaagcggggcatggttctggtgacagggcctaccggaagtgggaaatccacaactctggcctctctgatccatgtgatcaaccaaaaatattcacagcatattattaccttggaggatcctattgagtacctccacagacatgagagatccatcgtcaaccaaagagagatcggcagtgattccactgactatgctaaagccctccgggcagccctgcgtcaggacccggatgtgatcctggtgggagaaatgcgtgatctggaaaccatttccaccgccataacagcagcagaaaccggacatctggtgttctccaccctccataccatcggagctgacaagaccatagaccgaatcattgacgtctttcccccaaaccaacagcagcaggtaagaatccagcttgctgcggttctggagtgtgtggtatcccagcagctccttcctcgtgccgacggccatgggagagtggcggccctggagattctatttgcaaacaatgcagtgcgcaacctgatccgggaggggaagaccttccaaattccatccataatgcagaccagcaagagggtggggatgcagacgatggatgatgcgctgtatgatttatatatgcggggcatgatcaatgcagaaagtacggtgacatttgcacaggatcccattaatatgagcaagaaagtaaattttgatcccttttaggaaaggaacagcatatgtcgggcttcaattacattgcagtagataaaaaaggcaaagaaaaaaagggttccatggaagcagaaaaccaggagcgggtagcggatcttctcaaggcagacggcctgctcccggtgagcatcaaagaacagggagcatttaataaagatattaatatatcctttggaaagaaaattaagtccagagatttaagtgtgttctgccgtcagtttgtaagtattatgcaggcgggtgttcctatgaaggaagctcttaagatgcttgcagagcagacagaaaataaagtactgcaaaagtctatattggatgtgctgaataatctggaaaaaggaaattccctggcagattctatgcggggtcagggggaggtttttccttccatgctcatcaatatggtagaagctggagaggcatccggaaatttggaaatggcattttcgagaatggcgatccagtttgaaaaagaggctaagcttaaggccacaattagaaaagcaaccatctatcccattgttttggtatgcgccgcagttggtgttattgcaattatgcttttgtatgtaatccctatttttattgatatgttcaaggacattgatatagaaatgccggcctttacaatggcagtgatgggagccagtgagtggatgggtacccattggtatatgattgttttagtagttgtggctattatcgctctatataggatttattatggaacttcatccgggcgaagcactattgatcatctgaaaatgaaaatgcctttatttggaaaacttacagtcaaaactgtctgtgctcaatttgccagaactaccagtacactgctggcagcaggaattcccatgatcgactgccttgatattgtaggaaagatagttaaaaatatacattattccgatgcactgaagtctgcaagggaagaagttatgaaaggaattcctttgtcagagcctttggaacattcaggaatcttcccacccatggtataccatatgactggaattggagaagaaactggtaatttagaagaaatgttggaaaagctggcagattattatgacgaagaggtggagatgaccacccaggcagtactggccgcaatggagccgttgatcatagtttttatggcagttgttatcggagcacttgttattgcagtggtatcgccaatcggcgcaatgtacaatggattggataccttgtaaattaaaagtacatagagaggtgtaacaaagtgggatgcaccacggaagcatagggccgtgttcatcaataaattaaatgaaagggagaattgttatgttaaaattctggaacaaaaagaaagaaaagaaaaacaacaaaggttttaccctggtagagctgatcatcgttgtagcaatccttgcaatcctggttggcttactggctccacagtatgtgaagtatgtggagaaatcacgtaaggcggcagatgcatctaacttggataatattgtgaatgggtttaaagtagcgtcggctgatactgattacgatattaaggctaatacgtatacaataaaaattaccttatcaggtgctacagtagctccgattgctgcagccgaggcgggagatttggttaatgcattaaaagaatatacgggctacgattttagttctgaagttacaagtatcaaattgaagtcaaacaagtgggaaaaagatacagacagtgcggcatttgctgtaagtgaaactaatcccattatagcagcacaaatagaggtaaaagaatcaggagctgttaatgttctatataatcctaaatctttaaaggatcaagagaataaggcaacgccaacaactgcagcacaaaatccagaacaaggtggcgctgaagcgtgatttgaatgtaatataataattcattaaatcatctccgggaggattaatcctcccggagagcttagaaaggacacacaatggaactatctattttggaactaataccctatgcagtcgtatttatatttggtatcacaataggaagttttctgaatgtgtgtatttaccgtatcccgaagagagaaagtattgtaacagcaccatctcactgtatgaattgtggtaaccaattgaaatggtacgatatggttcctgtatttagctggttgtgtcttcggggaaagtgtcgtttttgtaagacaaaaatttctgtgcaatacccattggtagagtttaccaatggctttctctacatagtgatctgtgtagtcaatggactgacaggggtcagcctgatttattgcttcatggtgtcagctttgctgaccctgagtgtcattgactggagaacttatgaaataccagttcaaattaatatttttctgggaattctgggaatattccgtataggtatacagccgcatttctggaaggaggctgtggttggcgctgtttgtgtcagtggattcttattacttttattttgggttagcaaaggaagcgccattggcggaggagatattaagcttatggctgcagcaggcctgatccttggatggaaaaaggttattttggccttcctattaggctgtataataggctctgtaatccacattatccgaatgaaagtttttaaggaagggcatgttttagcaatggggccatatctttctgcggggatttttttagcagcattgtggggagataaatggataagcagttatttgaatatgctgggtatttaaattagttggattattaagaaagctgtttccaactgcaaaagtacattttttgcggccaatatttgaagtgtatttttgcagttaggaacggaaccgaaggtaaggaggacggaaatgtcaaaggtattaagcgttgaggtggagaaaagccagataagggtcgcagtggctgagcagggcaagaagcgtatccggctgttgtcctgtttttggttttccacacctcagggggcagtggaggatgggtatatccgggatacgcagtccctgggtgaagttttgaaaaacgaattaaaggtaagaaaaataaaaacaaaaaaagtgtggtattctatttcatccagccgggtagccagccgtgaagttcgtatcccttatgtgaaagagaatcgaatccaaagtgtgatccaggtaaatgccacagattatttccctattgatatcagtaaatatgttatttcttataatgttctgaatgtggaggctactggagaaggtaaggatatggaaaagcaataccatatgatggtatatgcagctccaaagtctttgtctgcctgctaccgtgaaatgtcagaaaaggcaggtctgaatatccaaggaatggattatcaggggaacagtatttatcaggcgatgaaagctgaggaagctgaaggcgtacatatggtgatgaaggttgaggaacaaaataccttgatcagtatttttaaggggagagaccttactctccaaagaagtcttggttatggtgtggatggtgcagtcaatgcagtgcgttcctatccagtatttggcacagatttatcctatgaaaatgcattggaagtgcttcacgagcagaagtgtatccgccgggtgttggattctgcggataattacagagagcctgaggatgtggatgactttgttttagaggccagaagagacaccacggaagcactcaggtacttggtggggaatgtggccagaattatggattattatcagtccagaaatcaaaatgtggaattttccaggatatctttatgtggtatcggcagtgagattctggggctggatgaactgctgacagaagaaattggtcaaaaggtggagcgtattcagcaggctcatagtattgtattaaaacaggatttttccagcgagggagagtcccttggtctgtatctggcagttgcaggtgcattgatacagccatctaatttgttggaagctgcagtgaaaaagcagaaagccgaaaatgacagcctcaccgggtcatttattgttttgggagtaggccttatctcagctcttgctttaggcggggcttctttaggaattcgcttttatcaggaaatggagcagaaagccctggagaaaaaggttcaggaagaaagcagcatcgaggaagtctataataactatatggctgcaactatgcggtattcagagtttctgcagatgtatggacttacggaaacagcaaatgaaggtcttgtggaatttatcgaagagatggaagaaaaaatgcctgcagatatttctataaccaggttcaattctaccaatactcaagtgtctatgagtatgaccatgggaggcaaagatgaggcggcaaagactttgatgcagcttcgtacctttgaaagtttgtccgatgttactactacaggacttacaggagttgacacagaaaacggcggccgtgtatctatggatgtgatttgtacttattccaaattgcctgctgatatgaaaatggaattaccccaggagtgggaggatttgacatgaagcggatgacgatacgagacaaaaagatattacttcagtttttgggaattgttctattattcatgagctatttctttgtatacaggccacagatggagttagccagtaccatagaagaagagaattttgtgctggaaagtaagcttgaggagcttagagagcttgccgttaaccgggagatgtatgaaaaggaaatagcagatatggcagctaaaatccaggattattgtgtcatctttccctctgatattaaggaagaagatggaattatgctcgcccggaggattgagaaaagtgtggacattatgtttggaaatcttacactttcgccaaaggaatttgtctattccatagacggtgaaacaggttcccagggagaagcggatactcagacattggcagaacagaatggggaaattacccaggaacagattaatgaaattgaggggattgatgagacaccctccgatcaagagagtggtacaatctatacgggaaatgccatggcgttataccgtacgaaaaatacattacaatttacctgtacttatcaggggttaaaggatttagtgaaatttctaggtgataaaaataatggccgtcttacaatagacagtattgaggcgtcttttgacatgtcaacaggcaatctgataggttctttggcagtcaacctctattcaatcgctggaactggtgtagagtataaagagccagaaacagataaagtcactttaggaaccgacaatattttcggtaccattgaaactccggtgaataatgccatagaagggcaggaagggactgcagaagaacagcagacccaggataccgcacaggaacagccacagcaggatatacagcagtaattcacagatttagagggtgttttcggataccctctaaagttgttctattgcctaaaggccataccatataaaatccatgagataggagtgagagcatgaaaagacggaaaaacttattaaattcaaataactcaggaataactctcctggagcttattattgccgtttccatttttgccattgcgtctgccgtgctcttgcaaggatttgtcactgcggggagagcgaataaaaaggctaatatttatctggaagcaacgtctttagcccagaatgtaatggaagatattaaatccaaggattttcaagaaatagcgttggaatacaattatccaattgattatttcccagatgctccaggtgttgacaaggaaagtcgtatagggtttttaagaggaagagaggatgaaattctttcggagagtggaattaggataagagaagtattgtattcggaaggaaactgggataatgtgaaaacctatgaaacagcaggagataagaaaggtgtaactgcgtctgtatattcggaagacgggggcagaagttttgagttccttccaaggattaaaggggatttggcatccaagtatttttttcagatccaaaatttagaattttcaaaggaaacttttgatgtacttgtatcttttgacggcagcaaagattccggatataaaaaggatagtagtatatcatcagaaaaagacaaaaaaaatgattatgaagttccccaaatagagaaattggatactaaagaaaatgcatttattataatgtcaaaggattgggatacggttgctttagaggacatgattgccaggcagaatgttgcggcaatagataaatttaataccgataaaaatgattgggacgcagcacataaggatgaaaacggagaagtaacagagccttttccctatgattccccagaaaatcttagatttgatgagttaagtgcaaacacaaagcgcagtcttatcataaaagttaagcaggaagccgggattattagtaccactataaaatatacaatgagtgcctatgactacgaggaatctgctccctacaaaactatgaaattgtgtccctgtggaggagcctgtacaggaaagattgaggatggatgcttctgtacattcaacagtattgaagcaaccttttattcctcagaaccaaatatagaattaagaaatgtatatttgttctattatccgaattacaattcaacagctaaaagtaagcctttagatgagattatattcgataattctattaatcttcctgttaatttttatgttacaaaacagagaaaagaggatgaatatcctttattgagtgacgaacaggcttatcgaatgaacttgaatattttagagacaccttcggaaacggaagataaaaaagatacaaactggaatacaaatcttaatatgtttcaggccaaaaccatgctccgtacaaacctggacacaaatattggagcgaatctggaagacagaattccggcatctcagatgaatcttacttatgaagatgtgtccagaaaagtttctgtcagcgatgcaaatgctaagaaggtattgaagctgaatgggctggatgccagggaatctaaggacaggatttatgctgtgagtgtaaaagtatataaatgccaggagaacatggaggataagtttcaagaaaaggatttgattttagaactgacaggttccaaggaggattaaggagtttgacgtgcatggataaatcaaaacaaaagcataaaaaattgaataataggggattttctctgattactgttttaattgcagtttcttttgtggggattttatccatgttagttctgtatatttcattggcaaattttcaaatgaaaactacagacctttttgcaaaagacagtttttattcagcagaaaaagccctggacgaaattcgagcaggcctccaggaggaattaggtgaagctatgtctaaagcttatactcaggtccttgagacttattctaaggattataattctgcagaggaaagtttggatgaacttcgccagcaggagtttaaatctttatatttaaagaatttggaagaagctctgtcagatggtggaaagaaaaaaggagaatatagtctggatatcataaaaggatatgtagatatgcttaaggaaatcgaagaccagggaaactctgcgaaggagattttgaagattctaaatcgaccgcagccaaatgaacgtcctttattggagtcggattatgaagagggtattgttctgaaaaatcttcggattgtttatgtagaccctaagggccgaacgtcaatcattgagacagatatccgaatgggagttccacaggtgcagtttccaactccttctacccttcctgatttaatgagtatgatcgttgtagcaaattccggggttgtatgtaaaagtggaaatacaatagatgcggcagagataaaaggaagtatttatgctggagacaagttgataattgaaaatggtgctgctttaagtattactggtggagagcgggctgtctgcgaaggagaaattcaggttcagtcaaaaggaatcggtcaaattcccggatttaagattaatcaaggggtgaatctatgggcccaggggcttgttgtgaattccggccaggtggaattgttaggaactacctattttgccgatgatattacagtaagtgaaggccaaggcagttctgtgaagatatccggcgaatattatggatacggaagtccggaatctgcaagagcatccaaatttggcgacaataagtataggttgcggacagatacagatttaaacagtgcgattgttattaatggaaaaggcactacgttagatttgtctggtgttaaaaaaatgatgttggctggaaataattttatctccaccagtgatgttgtttttgatgacagcttaaacacaggtaatcttgtgctggagaaaaatcacgatattttaactggtgagagcattagtgtaaaaggaacgcagttggcctatttggttccttcccaatgtttgtacgatggtaagcgttcgaacccaatgacctatgagatgtatttacaagcaacagcattggaggatatacagccttgtaacattgaccagccaatagatgcttggggtggccgtactttgagagaaatgggagtcgatgagtcagagccttataaggaggtattttattctatgggccaggaaggattcgtatacttttatttgaatttcacagataatcagaaagcttcggacttctttcaattttattatcagaccttccctggaaccaaggctgctatggataagtatttgtcattttatttgggtggtgataatcaggggattctgatggacgatcccaatacttttcttcgctatgttaccaatggtaatgtacttacgtataaaggcggcggagaggataaaggtgagctctattcagcaacaaatcctaacaaggacagtctgcttattcaggaacagacaaattaccaaaatatgtggtatgcattaactcgcaagatggtttctagttatgatttattgaacaagtattatgataaagcaggtaatattatccgtgatgagacagattctgataagcatgtctttgaaaatttggttaatattgaggccttggaaaattttgtagaggaccgtcagaataaaacatatgtatatcctccggataaagatggtgcatctttgtgtgcgtatattgttgataacgctggaactaagaatgaagatggagagacaatcggaggctgggaatatactattgataaagaaatggcaaaaacagccaggcttgtagtatgtacaggcgatgtaagaattgaggaaggtgtatcattctacggtattattatgtgtaagggagccctaacccttgaaccaggagccaaattaacctccgctcctcaagaggcagcaaaggtctttcaggaacaacaaaatgaagctgttcaggaaggcacagcgcccatgaatttcttctgggagggcgataagtatgtattgggaaatacagaatcagaagaagaggatgaagaggcagctccgtcaaatacttatgatttggcagattatgtgacttatgagaactggaacaagaaatagaatggatgtgggattaatgaagaaaaatagcggatttacattggtggaagttattatagttgtagctatattaggtattttacttggaatgtttgttccatccgtgaatccgctgtttggtttccaggcacaaaaaacaacgggagagattacagcagctttagataagacaagaatagaagctatgagccgtctggttgcccaaatgaagctggaaaagagaacagacggtgtgtatgtgacctatcatttatacagaggccgccagcatggaatgtccgaggaggaggagaagatcggcggccgcagggtggatattaaatatactttggataatgggaatggagagcagactttagaggtaggtgaaagtctgatactttcttatgatcgagatacaggtggatttttacaattacaaaaaagatttgtcagcaaagatgaggcggaggatgtggaacaggatgttagatttgaatttagcggagcatattgtaattcgattatcgtaactgcaggtatgcgtaccagagaaataaatttaaacattacaagcggtaaatatactacacaatcgagataagaaaatttggactgatacagtagaaaatagcaggagttgtgtgatatgggaaagaagaatcaaggctttacattagttgaattagttgtggttatagcaattatagggatttttatgggcgtgattttaaactatgtcaccggaggttccaacagctatcgcaatacttctggcaattctagagcacagatggaagtccaggaaacctttgatcagcttcaggagcttattatagatgcaaatcgaagtgtatattatgcaaaaggggatactaacgatattgggaataatattgacagtgatatggatgaccataccccagttgctggagttaaaactttttttgtatgtaataaaaaacaagtggaaggtaaactacaggaagtagtagatgctgttacatataatccggaaagtaaacagttattttatgctagaagtacaccgtcgaaaacagtggatgatgcagaaaaaacttcgcaggtttcgcagacctcacagttgtttgcagacaatataggaagttctccagatactatggaaagcagtagtacagacagtgcggttttggctaaaaatgttgtgcaatttacagcagacacaacaaaagtaaccaccgataggattgtgcgttttaatatagttgtcgatgatcatggaaaaacagtagcaacagagcatgaagtacatttaagaaataatattatggtagctcctccaacggagtcttttggtgatgggaatatttctgatgcgtcaattgatattattgaggctcctgcatttatttatacaggggatataggcagacttatatgcagtgtgcatggaaatattgatatgtctagcatacaatggtctatcaacggagaaggggcagataaaatagatcaagataatcgaagctgtagaatagaaggagatactgaagtagaacgtacagttacagtaattgttacgggaaaacattctaaaactggtaaaagttattctgcgagcaaagatgttctagtattgccaaagaaacatgaggctgaaaaaaatatttctattagtgggcctactatattggcggctcctggtggacatatgtcaggtgaatcaataaatcattctttaaaggatattttgacagttacatttaccgatggaaccaccagtaattctgttgctgaaaattgtacatggagtcttgtttctgctccggttgagggaataagttataatccaagtagttctatgataactgttcaatcatctgctggcggtcatactaatgcaatgacgtttagagctacttataatgataatggcaaagacttaagtactgattgtacagtttcattcgcacagttgaatataacttcacccaataataatggagattatcagactggtgacgcgaaaagttttcatgctgatgtcgtggttaatggagtaaaaggttcctatatagtggaggataatagctggaatttgggagatggttctacagttgataatccgaatccgtttattggtgaacagtttttagtaaaagatgttggcttgtggtatgtcaatgtaaatgctagctacggggatatcaatggtattttaaaagataatatagcatttaatgtaaaggaagatttagaaattgaaattgtagggccaaatacagttttaaaggggaataattatgatttggagatgtattttaatcaacatttttatgttgtaagcaaaaaaattagtcttgcaaattattctcaaaaatggagtgttgaatttaatacagactcaaggacatctgcaagtataggtgtagttaaagtaggtccaaacgaagaaggatttaaattagttcttacattagtaaattataacgataaaaatgatataattgtagtaaaaaaagatattcgtaccgctgagataaaaatattgaaaccacaggaaaataatattaattatggtaataaaattaattatttagctcagatttatatttatggtattgatgcaaatggccagcattatgttaaaaatattgaggatatgggagattatagtactgcgatatatgaatgggggattggaactaataatcaaatggttgatgctataaaattgccgtcaattataaaatcgggagaggtttatgcattgaatcctggcacgatgatgttattagttcatgcgacagtaccggaaatagtacaaggacatcaaacacagggtataagttatacattatctgatattaaagtgttaactatcaatcagatgcaagaaaacaatgacgttatttatgcagaaccgggaaatgggaaaataccttttatcaaattgactaacgagcaattgaaagttgtcacaattactggttataagaatggggagattattggtacgaaatttactgactggaatggcggtggatgggaagtcgaaaaagtagaaggttctaatcctggaataaaaattaaattgacaggaagtgaaaaggaatatgataagatagttattgaagctaaaacagattcagatgtgttttataaagttctcgtttggaaaaaataattaattgtgatatttaggaggcagacatgagtaagcgtaacagaagaattatcatatcaatgactgctgtcggtatggcagggattctggtagcaggaacactgttgcagaccagtgtccaggtgcaggcttctgctgccatgatgcctgggatagaggagattgtgaaggaaaatacagaggaagatccgcttcgtatccttgaaattgtggatgaaaggaaggaggctgagctgggttattatgtagcaggacaggagccttatattaaactgtataaacatgaggtgtcgtcacaagatgggaatgatacctcagattcgcctgtttatgaaacttatgaaacattggaggaaggtctcagcaaaatcccaacaaaagaggaaagaaaaagatttgcagaaaattccacaggagatagtttgttagatactgggataaaaaatgttacagatccggcattaggactatgcggagaagatcctctgatttttccactatcgttcaaggagtacgaggagcgttactttttgacagatgaagaaaagatggaccaggaatggaaagaacttggactggcagaagtacgttctgatttaattacgggtgtatatgagaaaaatcgtaatggtacaggagattatacgaaacaggaggtcacttattatcctgtccgtgaaaatgtagtggatgataagaataaggcagagttttgcgaaaatatacaaagctttggctatacaggcgtaaagtcaccttatgaattaaaatttcaatcagttcctaataatgaaatcgaagccaataaaacaccgtcttatatttatcagaaaggcggctatggctattatgaaaatgtataccgagaattgaccacgtctcagatgcaggaggatttttttaatacaatcccaggtgaagcgttagacgaaaacggtcagccagttcagaattttcctgataacatgtctattgagcaagagggatttgctcaggaagggtttgaagttcaggaagaacttgttgaggattggggcgctgcttctgaagcggcccaggaaatcagttttggtgatgattcagtagtagaggaaattccttttcaagatgaggaaataaattcaggagctgtagccctgccggatgagaaccaggatttttcggatggaaccattggagatagtgatattacacaaaatggcagtgaaacttctgttattttagaatctggatgggatgaaaccatcagtaagacaaatcccagaatttatctcgcagagtctataacacagtttcctaattatcgttatcaggtatacgggacattagacagagttttgaaacaagcggatgcaactgctcaagcacagagtatggcccaggcagaaggaaaaaattggattccgtctgtaggagatattactatgtcttctgacggagaatcctatttatattgggatcaggacgaaacaggtatactgcgtacacagagtctttattttgtggaaggtttacaggcagttgcctataaaaatgttcaggaaatagcagatgatgtaatttcttatccttattattttgtagttgctgaaaagaaattttgctgtcgtttaaaaaataacatggcttcacacgaagaaaaaaatccagaaaactatgagtactacggttcctattttgcttattatccagacaatgaagaaccttatgtaactgcagaagagggaaaaggtacacattatactctggaggctgaatttaagtttacgccgggaaagggggaccatgattttatttatgacgaaacaaaaccagaggttagggttgaagtcgatcatattttttataaaggcggttatacaaaccatgattggtttaaacgttttgttcttcatctggacccgggtgacggaagtgtagatacgacacttgatacagaggagaagagacaggctgcaaaggagaaatttgatgatttttcaatagttgtagatacaaaaacagtaacagaactggcagaagaattgagggttaccgatgtgcaggaactggctgtggagtctgatggaaaaagttattttgcagatggtcagtcagaggatacattttcttctgaggatgttgtacaaattggagaggatacagctatagaggcagccggatttgaagaggaaactttgttccaggaggactctgattctgaaattttagagattaacgataatcaggagctttttcaggcagattcagccgaacaggaattaaaagatgagggatccgagtttcaggcagatcaggctgaagaggaagtcttttcattggataattatgacttgatttatgtgaatggagtattaagccagcaattgtccgaaaaacttctggtatgtatccagaacaagtcaggatgcattgtaaatatgttaaagttaggtgaaaacacggcactttatagtgttttaagcccatacttaatggaaaattatggtgatcactatgtatcaaaaaatatttatttttattacagaaatacggaaaagggtgatttaagcttttttaattctggatttaatgagacatttgctggtcttgaggatacagatcaaggatttgcggatgatttgatttcaaagggttttgaggaaatttcagattatatccagcaagagaacaaattaaggcagttgcagcaaggagagaataaaattgctctcttggataaagcaatttctcaggcaagggttgtagaatacttattgaattacaaattcaaaagagagattgctgaaaaaaaagcattaaaggtgttggaaatccaaccaggtgttgctgagtgggaactgtcaccggacaaaatatggtcccttttaggatatgattcttcagttacagcatgttgtgaatatagtggaaatgaagcttcatatttagtagataaggattcctctacaatttggcatacaaattacaagaatggagcagcaaactgtcctatttatgataatggtggatatcattattttatttatgatttaggggctgagtataatatatcaggttttacatatcaatcaaggaatacgggtggcacaaatggtattattagcgaatttaaagttgagatttttgatagtaatcctgatataagtggtaaccatatccaaactcatgataaaaactataatgttgggcgacttaagctaaatcaaagagtaacagttaatctcactgatgataacggaaataaaatatcagcaagaggacaatttataaaaataacggctgttagtggatgtgtggatgataattgggtcaatcggccaaagtttgccagcggtgcagagttttcacccatttttgaagctgtcgatgatagtgtttattttaagcctagtatagaaatagtacagatgacggcatcggaatttgtagggcatacggaggatttaaattctgagtacgatatgatctatataggggatcaatgtactaatagggatccgctgataaatggtaatggaagtatgttatatacgcatgtaggaggcgcataccgggcaacagacaagaactatttatacaagtgtatgggattgcttaataaggatattgacggtacagaggtcgttaaagcaacaaatgagaatacagttggaacatttcgagggtcaggaaatgatattacagagaataaatatttagaattagttaattttgtgaagagcggatatcccgtattggttgcggattctttgtatataaataattccgcagacggaaaaataaatacaaatatgattgatagttcttcttattatggcaactttttaagtgatatggggaaatatagtaatgtcatgaccataagtgaggcgaataccaaagaagttcgatttttgatgaatttattaaaacctagtatagtggaagagtctttccaaggacctcccgatgcaagagaaaaggaaggtggagaaaaaggcgatagaattcgtgattatgaagacgggcttacttatacttttactattgaagatgtatgtgcactaagtccagcttctactagatataatgtggagctttttttggatttaaataatgatggtgtatttgctaaagaagaaaatcagagttcctatattgtggtttcatctgatggaaatattataacgcctggatcaaatggatatgagttagaggcgggaagacaatatgtacttaccagaaaggttcctgttaattataaaaaacttattacatggaaactgcagataacagtgactaataataaaagtctgcgaacatctgttaaaggctatgcgaaaagggaagcgagcagtaataaatcaactattgaagttcttcagattaaacaaaatgataatacgagttcaggaacagcgaagtttaataagaatacttgggacttagcccaagataagacacttggtaatctgttaaaaagtgtggaggattttgaaattaagataaaaagcatgactattgatagtttttcaaaagaatttcaggaagccaaaaagaaaggaaaaaactattttgatgattatcagatgcttataattggttttgcggatgtatatgacaatattccagaagaggaggtccaagcaatattaacctttattcagaatggaaagagtgttatctttgctcatgatactacttcctatattaatagaagcgaagatataacaaaggttaaaggtggaaatacttttgagaatttggatggctttttatatcgtaatgatgttaaatctagtgattgggggtattatttaaaccagtatatacgtcctgctgtgggtatggatcgttatggcatcacctcagaggttattggggaagagttgagaagcggtgaaatattaaattctcaattgttaaaagataaagggtatgatattgcttatatgctaaataatccggtatactcttatggagagacacagggatttacgaacatacgtttaagtgttggtgacgttggcagtgatgcaataacaaataaagtaactacagtgaatgaaggtacagttacccaatatccctatagaatagaagaaacgttttcagttgcagagacccatgcacaatactatcagttggcgttggagcaagacttgaatcatgatagttccagtgatatagtagtttggtattgcttaggagataatggaacagaggggaagaaatataagaactcaccgaatgatgtaagaaataattactatttctatagcaaaggaaatgtaatatatactggagtaggacataattctgcaattacagatatggaaagaagattatttgttaatgcgattgttgcagccgctaatgttactgttgttcagccggaaattgatttccttgaatatttccgtccagattccaggaccattaataatacgtattatatggccgatttgacttctggagaaaatggcaatagtatattaaatgacgaactggatatttattttcaagttaaagaatataatttgaccagttcgaattttgcaggcggtactgacattccaatgcaattacaggttcaattgggagaatttgagaataatttaattgttggtaaagatattcagctttatgagtatgatggttccgaagaaggaattaatctgggggaaagtacacaaattgatgtaaataaggtataccgtatacatttgttgaatccagagaaatggcttagtgatggaatgggaggatatatatctaatttgaagatgaaggtaactgtatccaaggaaattgagatttatggaaagccagataaactgtattcttcagaagtgatgaatattcgtcagcgtccattatttaatatggattaagagaaaggagcaggtttatgtcagagaaaagcgataggggatttacattggttgaattgattattgtagtggctgtgcttgctattcttgtcggcctgcttgctcctcagtatgtaaaatatgtggaaaagtcccggacagcagtctgcgaatcagatcggcagagtattataagagcctatgaagttgctgtaattgaagaagaaccaggaaactatcaggaggcggaagctttgctgaaaagcattatagtatccgaaggagggaaacaagaagaatcaggaaccagtattgataataccggggtatattctggcatttgtaaaaaaaggggccagtatagcggccttttttccagtgactttttaagagtgagtctatattgctccgttcacggtgaaggttatgtggatataaagatactaagtgagcggttacaaaatttaaaatttaataatatatccggatggagtaaaccttatacaacactggatggatattttttggaaatgcagaaaaaaggcgcatatagtctcgattcagaagcggtaggtacaaatactggaaatgcatatggtgtagggaataagtccttagctgatgcaatcgaaaaacaattaaagcttcaaggtattaacatatccaacaggagttggagagtatacaagaatggaacaatgtataatgtatttttgacagatcgccaaataacattagacgacttaaaaaaggatgaaaatggcaaagacatttggattacctgtcagaaatatgatatcacaacgggaaccatattaaagggtaaggtaacagttacgaaaggaaaagatggaaattatcctataataaacgataactcatttaaagcagattagagtgtttacacgtatatgattcagttgaaaaacaggatgttttgacaatttcacatgttagaactcctgttttttgcataaaagaggaacaaccctatgaacctacatcaagcaatggaaacaatcacagtctttcaaagtgcatccccagccaccctggcctctcttttgtcctgtgccaggctttgcgtatatggcaaaaatgacaccattttccgggaacgggaggagacgggcgctttttattttgtttcccagggcctggtctatctgtccagactaaaccaccaccaggaaaaccgtgtgatcttcctgtgcagggaaggggaaatgttaaatgaggacttaatggatgagaaaacctcttctgcctcctgtatgaccctcaccaaggcctgggttatccgcatcccggagaaggacatgcggtttctcatggcccaggactttgggctgtgtcaggcagtcatgagctctatggcgggaaagatccgcaggctgtatcatcagatgaaaaataccaataactccgtgcgcctggagcagcgcattgcctccaagctgtggaagctggccaaggattatggtacgccgtccaaagagggcatgtgcatcccctttgacctgtccatcacctttctggcagatatggtgggctccaagcgggagaccgtgtccaggaaggtgaaggagctgtgtgagctggacttggtccaggtgaagggaaagacgttttatattcgggatcagaaggaattattagaattttttcataaatcgtgaggacgctcacggaaatcttccggcggttgtgttattcttttaacatcaaatacgaaagggagaaagcatatgggatatcagttaaaccaggaaggcttccaggctttcctgtcacaggtgtcgcaggattatttagtttatgcccccaaacgttttcaggggggaaatactttctctgacgtggattgtatccgctatggggaaatcaggagagtggaggagattgtctttgacgagaaatcccattattcctttaaagaagtgttgcttcccatctctgaaactttgttttattttacagaggatcaggtgaaggagggagacattccccggaaaaagggagctgtggtattcttaagaagctgcgaccttcacggggtgaagcgtctggacgatatgtatctgaaaaatggagcagaggattattattaccgccgtttaagagagggaaccaagttcgttctcatgggctgtgaagaatcctttgaaaattgtttctgtgtggatatgggaagcaatgtgtccacggattatcagctcagtgtggacaggaagggggatttcttctatgtggactgtaaggatcaggagctggaggaaattttcaaaaagcttcccaaggcagagctggaggtaaaaccttgccatgtgaccgagaacaaggtacaggtaaatattccggataaccttactgcagcagtggcaaaaagctccatgtggcaggaatatgacagccgctgtattgcctgcggccgctgtaattttgtctgtcccacctgtacctgcttcaccatgcaggatctgttctatacagagaatggaaaagtgggagagagaagaagagtgtgggcttcctgtatggtggacggctttacggacgtggccggaggcgggagctaccggaggaacaacggggaccgcatgcggtttaaggttttacataaggtgctggattataaggagagaaacgggtatcacatgtgcgttggctgcggccgctgcgatgatatctgtccggagtatatttctttttccaactgtatcaataagctggagaaggccatggaggaggtggaagggaaatgatcgtgaatgagtatgtaccatttctatctgaaattaaagaggtgatcaagcacacggctattgagtataccttccgcatgtcctatgagggtgaggtaaagccgggacagttttttgaggtatccattcccaaatacggggaggcccctatttctgtcagcgggatcggtgagggtaccgtggatctgaccatccgaagggtgggcaaggtgacaaatgaagtttttgagcgttatgtgggggatacccttttcttgcgtggaccctacggaaacggatttgacctggagaattataagaacaaggagctggtggtcattgccgggggaaccggactttcaccagtgaaggggattgtggattattttgctgaccatccccaggagaagaagaatatgaccctggtggcagggtttaaaacccccaatgatattttgttcgtggaggagtttgccaagtggaaaaaggccatggacgtgattctcaccgtggactgtgcagagggggatacggtctgtcaggtggggctggtgacccagtatatccctcagatccgtgtggatcacattgaggacgctgtggctgttgtggtgggaccgcctatgatgatgaaatttacagtacaggggcttttggagcggggcttccgggaggaaaatatctggatctcctatgagcgtaaaatgtgctgcggacttggaaagtgcggccactgtaagatcggcaatgcctatgtgtgtctggacgggccggttttcaactatacccagggaaaagatctcgtagattaggaggatgcaggccatggatgtgaatacaaagaaattaaagaaaaacgcctttcgcgtgacaaaggtgaggggccttactgcctcccgtatccgggttccgggaggtcatctggacgcaaagtatctgtccctgcttcaggaaatcgctgaaacctatggggacgggaccttacatatcaccaaccgccaaggttttgagattccggggattccctatgagaaaatgtctgaggtgaatgagaagcttcagccgattatccagggaatggagattaaccagccggagccgggaaagggctattctgcctccggtaccagaaatatcactgcctgtgtgggcaaccgggtgtgtccctatgcctgctatgataccacaggctttgcccagagaattgagaaggcagtttttccaaatgaccttcattttaagattgctcttacgggctgtcccaatgactgtgcaaaggtgcggatgcatgattttggaatcatgggtatgacccagccccagcttgagccacagcggtgtgtgaactgtggggcatgtgtgaagtattgctcgaagaagtctgtggaggctttgaaaacggtgaattaccgtcctgttagaaatgaagagaagtgcatcggctgcggggaatgcgtgctgaactgtcccacaagagcgtggacgagaagtgaacagaagtattaccgcctgacgatcttagggcggactggcaagcgcaatccaagattgggtgaggattttattaagtgggtggatgaggagagtattattaagatcattctcaatacctatgagtacgtgaaggaatatattgatctgacggctccgggaggaaaggaacacattggatatattgtggaccgcactggatttgaggaattcaagaaatgggctcttcgggatgtacagcttccggctattgcagaggtgtcaacaccggtgtactggaaaggtgtaaaatactgttaatgaaaaccggaagaggagagaaaacgaagactggcaggtggtcgtaaaggactgcctgccggtcttcgttcattttttatttgttgaaatattcttcataccataccaggaaggtatagatggtccagatttttctccagttatctgagttcccggcaatatagtcatcaaagatccggttgatctcgtccaaatggaaaaatttctctgctgtttcgctgtgtaatttttggcgcacatcttgattgtaacggtcgtcagccatccagatgcggatgggcacaatgaaacctagttttttgcggaaggcgatttcggcgggcagcacttttgccgctgctgtgcggaaggccactttgttctgttggtcatttactttatattttgagggcatacgggaggcaatgtcaaaaattcgtgtatccgtaaggggcatacggatttccagaccggcggccttgctcatcttatcgatgttcagatagatatcgccctccagccagatctggatgtccacatcggacatttttgtaaggggatccagaccttcggtttccttataaatttcctctgccacctggatgggaaggacatctggattatattttttcaggatccgctgcttttcgtcctctttcatgatgttggtattgcccacgtaaaaggttttcagattttctccatagcgttctgcattccggtacatattgtagccaccgaagaactcgtcggcgccttcgccggagtagcagattttggcgtgccgggctgtggcctgacagccaagagcgaacacaatggcggaggcatcccccaggggctgctccatattgtacatgacatagggaactgccgcaaagtattcctcaggggtgatcacacgtcttgaaaatttccttccaagaaggtctgctgtctgctgggccagacgggattcatcaaagcgttcctcttcgtagccgcaggaatctgcctgagttatgtctgacatggccagcacataggaggagtccacgccgccggataagaaggagtctgcctcttcgtctgttgtcttaacctctgtgaggatttttccaagagtggtatggatctcatcagcccattcttccatggatttgctgttgtctggatggaactggggcttccagtagcggtgaagctgaagctttttatttttccagatgaggcagtggcctggcatgagcttcttcaggcccttgaaaaaggtattttctcctgccacgtaagtgaaggtgagatacaactgcagcatatcttcatttaattcttttacaaagcctggctgttccaggatggtacggatggaggtgctgtagagcaggttgccgtctgctgtctcataatagtagaagggttttgtcccaaactgatcccgcaggcagaagagctggtctttctcttcatcccaaagggcaaatgcgaacatgccgtgcatatggctggccatgtcttttccccaggccagataggccttttttataatttcctgctctcgttcttcacgggataaggaaggattaatggccagttccttacaaagtgcttcccagttacgaatatgtccgctgtattccttgatttttatcataggtacatcctctcacatgaaatagtagtcttttttactcgtctattctaacataatctggagaattctacaagaaaggaccgggagttgtttgagggatcgcttagttcctataaaagttaggacttctctggcagggaaaagtctgctaagataggggagaatgcaagggagcggtcagcttcctctggaaacagcaaggaaaggcagatgatgaaagtggcaaaagaggcaaagaccaatgccatgcgtatgctggagagacagaagattccctatgagccgatcacctatgaatgtgaaacatttatagacggcattcatgtggcggacaagacgggcacaccccatgagcagtcctttaagactctggtgatggtgggaagaaccggggggtattatgtgtttgtggttcccattgaaaaggaagtggacaggaaagcagcagccaaagcagtgggagagaagtctgtggatatggtccatgtgaaggatattctggcagtgacaggatatgtgcggggagggtgcagccctctggggatgaagaagaattatcccacggtgtttgacgcatccgcaggggattttaaggaaatttatgtgagtggaggcagaatagggcttaccttaaaggttccggtggagggacttttgaaggtgaccagagggaagctggaggccataaccgtgtgaccggatcttttcccacaaaagccgtcaggacccttgtgagtaagggatctgacggcttttgtgcaagattttttggctgtttagttatcctgggcatcctcttcagagaggctgtatacatggcgcttcttggccatttcatcacttgccaggtattcatcgtaggtggtgatcttgtcaatgagctgaccgtttggaaggatttccataatgcggttggcagtggtctggacaaactggtggtcatgggaggtgaagaggatcactcccgggaatttgatcagaccattgttcaaagcagtgatggactccatgtccagatggttggtgggctcatccagaaggaggatgttggcgccggagatcatcattttggacagaagacagcgcaccttttcccctcctgagagtatgcgcacacgtttcacaccgtcttccccggcgaaaagcatacggcccaggaagcctcttacgtaggtggcgtccttgatctcggaatactgggtcagccagtctgcgatggtcaggtcattgtcgaattcctgggtgctgtctttggggaaataagccctgctggtggtcacgccccatttgtaatttccttcgtcaggctccatctcacccatgaggattctgtagaaggtggtgatggcctgctcgttggagcccacgaaagccaccttgtcttctcttcccagggtgaaggaaatgttgtccaggatttttacaccgtcgatggtcttggacagaccttctaccataagcacctcattgccaatctcacggttgggacggaagtcgatgtatggatattttctgctggaggggcgcatctcatcaagctggatcttttccagggcacgtttacgggaggttgcctgtttggatttggaggcattggcgctgaaacgggagataaattcctggagttctttgattttttcttcttttttcttgttggcttctttcatctgtttgatgagaagctggctggattcataccagaagtcgtagtttccggcatagagctggatttttccatagtcgatatctgcaatgtgggtacataccttattgagaaaataacggtcatgggatactacgatcacggtgttttcaaagttgataaggaattcctccagccattcaatggcaggcaggtccagatggttggtgggctcatccagaagcaggatgtccggattgccgaaaagggcctgggcaagaagaaccttcaccttcatgcttccgttcagatccttcataggggtatagtggagttctgtatccacaccaagtccgttgagaagagtggcggcatcggattccgcttcccagccgttcatctcagcgaattctccttccagctcgctggcacgcatgccgtctgcgtctgtaaaatcttccttggcatagatggcttctttttccttcatgacctcatagaggcgggcatttcccataattacggtgtccagtaccggaaaagcgtcatatttgaagtggtcctgctgtaaaaaggaaagtctctggccaggggtgatggtaacatctcctgtggtggtttctaactgtccggagaggattttcaagaaggtggatttgccggcgccattggcaccgatgagtccatagcagtttccttctgtaaatttaatatttacgtcttcaaacaatgctttttttccaatacgtaaagtcacattatttgctgcaatcatttttgtacctcattctcattaaaattttcgttgtcattttttaccatctcttcctattataaatagggagataagaagtatatcttagcgggtggaaaaagtgtcttgcctcaaagagcagtggaaaaggagcacccgggggatatacacagtcgtctttattgtacctgaaatatagaattttgcaagaaatatttttgacaaaatggggaaatcgtgatataacagatagaattggagtgattatcatggtttttgggcaaagtgccaaaacggattggaaaagaaaaataggagaggaaatcttatgagcggacttttgaatactttggctgatattatggggcagaatctttggatagctcctgtgctcagctttattgcaggaatactgacttcctttactccctgttccctagcaactgttcccatgctgctggcctgcgtgggcgccacctcggcggggcccaagaaggccttccggctgtctgtggtaatggcagcaggaatggcagttaccttcggcattttcggctctgtggcttcggctatcggccaccagatgcatgaggcaggacattggtgggcgctgctgatgggaatcctcatggttttaatggcgctgcagatctggggtgtgatccacttgatcccccatgttcacgtaaaagaagggtttgggaaaaaaggatatactggggcattttttactggagctttagggggactgtttgcctctcattgtgccattcctgttatggtggcactgctggctttggttgctgagttaggcagaaatgcctggtggggtgtgcttttgatgattctgtatgcagtgggacacagtgttctgctcattgccgctggcacaggatacagctatctggaaaagctcataaagaatcccaaatgtgcttctgtgagcaaatggctgaaaatcgtgctgggagttgtgatttttgcagtgggcctggttctgatctttggagagtagggagttcgtgaatgataatagaaaagtgtgtgaatgaacggaatatgtcgtattgcgtagaaacgtgtcgaaaaagcgcaaaataggaatcgattactcacgaaataatattgacatatttacggaataactatataattcttgtataaatatgcccgacctggtaagttgtggcacaaatgataaaagaggggccgtaaaatgtttataacaagagaatgtgattatgccatccgtgtcattcgcgcactgaatggggaagatcgtttaagcgtgaatgagatatgcgagagagaggatattactgcaccatttgcctataagattttgaagaaactgcagaaagcaaagattgtgcgggggttccgaggcgttcatggcgggtattccttaaaagaggatttgtctgagattacgctgttgaaggtgtatcaggcaattgatccggatatgtttattattgaatgtctggatccggaatatgattgttccagaaacggcgcgaatggtctgccctgcaaggtgcaccaagagctggcgaggatccagaagaacctttgggatatgatgggggagaaatccctccagcagattctggaggattaaggttttaagaagaatgaataagaaaagtgagaagctgatggaatcaggtgcggaggtacctggggctgtcggctttttttctgtgatttaagtgtcttggaaaatgcaggatagcccttgagtgaatattacaaatgtgctattataattggtataaatgacggaaaacgcacatttgttcaaaagcaaaaacggaatcaacaaaggagattgtcagtaatgagtaaaacggaagaacggctgagccttctatcagaaattgccagtatgtattatgttcgtaatatgtctcaggaagaaattgcagaaaaaatgtttttgtccagatccagaatttcccgcctgcttaagcaggcaaatgagcttggggtggtagaaatacggattaagtattttagtgaacgcaacagctatttggaaagactctttcgggaaaagtatgagctgaaggatgtacagatctataactgcaacaactgtacagaacaggaggtacatgatgtcatctgcagatacagcgccatgtatgttcagggaatgttacagaagaattccatagtaggtattaccagaggaagtattcttgcaggcatgatagggtttttaaataaaccgagacagttgaatcttacagtgatccaggtgatgggagctgaggcaagagagtctattaagacaacggccggagatttgatacgagaaatgatcaatcggttcgggggaacggctgtgtatattgacgcaccactgtatgtggagaatgatctggtgcgaaaagagctcctcaaagagcctatgctggccagagagttgagaattgccaacagcgcccagcatgtgatcaccagtgtgcggcatttgtataaagatatggaaaaccatgtgtggagtgggtttatagacaacaaggtgttaaatgaaattgtggaagcgggcggagtaggatatatgtttggcagggcgttcactattgaagggaaactggtgaaccatcctgtgaatcatagaattatcgccattgatatggaaggagtgagaagaaaagcggtaacagccattgcctatggaaaaaatcatggagaggctgtgctgggggctctcaggggaaggtttatcagtcagctgattattgatcaggcttgtgcccagagagttttggagttggacagaagccttagccttggggaaacaaaataggggcagaagaattttccactctgcccctggaagttgtagaagtaacgttttatgaaaatgttaccagaactgttttatgtaattgtctgctttttcttctgtaagagagtattttgtaaggagtatatttctcacggtctctactgaaatcccgcattgtttggacgcatctataaaaagctgaatgccttcttccaggcctttttgaatgccttcttccaggcctttttgaatgccttcttccaggcctttttgaatgccttcttccaggcctttttgaatgccttgttccaggccttgttccaggcctttttctaaccctctttttaagccgcgtttttccgctctttcttctacatatgatgcaagatccaacatttcatccacctcctgaataccttttttatctgataagggaatatacttcatgactttttgcctgtttccggagaagattccatctaacatatccagaattccatcctcaggcgcttcatcccccagccggacaattaccacctccaacaggtcgccagaatcggccggcgtaatgttctcgtttttgtaattcataaatttgtagtaagcgattgaattttgttcttcttccggtatattctccaaacaaatccagatgctgtaaactttttctatgctgccgtatcctttttcatttttatccaccttgggaagctgcatggatatttggcggcatgcataatacagtcctctgtttataataggataacctggctgcgcatccttctgaatttccaggttaatatggaggttaacggtgattctgccgttaccgtatgggcgcatcgcccggaataagatgtcataacgggaggttgcctccccgatgataatagattctgtgttttctcctcgtatcgtattggacatatccggggatacagcaacggtacctgtctgtaccgtatcgccttcaatgaaatctgcgatctgttctacggtacaacccttatattctgccacaacgtattgaagtatgggagcaaggatctcctttctaccgaacagctttttgctgccgttatcgtatttttcccggaatcttgcagcttccatagttgcttctaagcccttctgtgctttcatttcctatcctcctgatacaaagcaagggaaacgttttttagatataattattatactttatatgatgtgttatgtcaactatacgtgcgcctacaaagagaaaaatgttccacaagatttgtttttgggatggtacctgtgatacccagagaaagcagccctcctgtactccagaggaagtgcgcagggaggttggaagacgggtaagggatttaaaagggaacggaggactggtccttgcatcggtccataatattcagcgggatgttcccacggaaaatgttgtggccctgtacgatgctttttatgaaaattccttttatgacaaataaaccaatgatatgacagaaggaaaaaactaaaactttttttaaacgttaaaaatttgttatatttgttaaactttttactatccgggaccggcctaagtgccggtcccttattttataaggaagaatgggggattttgtacctgatttggtacaaaaaaaacgcaaaggaattggacatttgtcggattctatgctatacttatagacggacttttagacacataagtggtctagagataatatcttttcacaagacctttaaggaggaaaaaactatggcaagaaagatgaaaaccatggatggtaaccatgcagcggctcatgcatcatatgctttttcagatgtggctgcgatttacccaattaccccttcatctgtaatggcagaagctacagatgagtgggcaacccagggaagaaagaacatcttcggacaggaagttcaggttactgaaatgcagtctgaagcaggtgctgcaggtgcagtacacggttctttggcagcaggtgcgctgaccactacatacaccgcatctcagggtctgttactgatgatcccgaacctgtacaaaattgcaggtgagcagttaccgggcgttatcaacgtatccgctcgtgcgatcgcttctcatgcactttctatttttggagatcactccgatgttatggcctgccgccagaccggatgtgctatgctctgtgaatcttccgtacaggaggttatggatctgactccagttgctcatcttgcagcaatcaaaggaaaagttccgttcatcaacttcttcgacggattccgtacatcccatgagatccagaagattgagacctgggattatgaagatttaaaagatatggctgatatggatgcgattgcagaattccgtaaccgcgctctgaatccaaaccatccatgccagagaggttctgctcagaaccctgatattttcttccaggctagagaagcatgtaatccttactacgatgcacttcccgcagttgttcaggaatacatggacaaagtaaatgaaaaaattggtaccgattacaagctgttcaactactatggcgcagcagacgcagagcacgtgctggttgctatgggctctgtaaatgataccattgaagagaccattgactacttaatggcagcaggcaaaaaagtgggtgttgtgaaggttcgtttgttcagaccattctgcacacaggccctcattgatgccatcccggatactgtaaaacagatctctgttatggacagaaccaaagagccaggcgctatcggcgagcctctgtatctggacgtagttgctgctttaaaagacagcaaatttaaagatgtgaagattttctccggccgttacggcttaggttccaaggataccacaccggctcagatcgttactgtattcgagaacactacaaaagagaaattcaccattggtattgtagacgatgttaccaatctgtctcttgagacaggcgctcctctggttaccacaccagaaggaaccaccaactgtaaattctggggcttaggtgctgacggtacagtaggcgctaacaagaactccattaagatcattggtgacaacactgacatgtacgcacaggcatactttgattatgactccaagaaatccggcggcgttaccatgtctcacttacgttttggtaagaaacccattaaatccacctacctgatccataaggctgatttcgtggcctgccacaatccgtcctatgtaaacaaatacaacatggttcaggagctggtagacggcggtaccttccttctgaactgcccatgggatatggaaggtctggaaaaacatctgccaggtcaggtgaaagcattcatcgccaaccatgatatcaaattctacaccatcgatggtgtgaagatcggtatcgagactggcatgggaccaacccgtatcaacaccattcttcagtccgcattctttaagctcacaggaattattccggaagagcaggcaattgatctgatgaaggctgccgctaaggctacttacggacgtaagggtgacgatattgttcagaagaactgggccgctatcgatgctggtgcaaaacaggttgttgagatccaggttccagaaagttggaagagtgcagcagacgaaggtctgttcatggctcatgccgaagacggaagacaggacgtagttgatttcgttaacaatatccagtccaaagtaaatgctcaggaaggaaataccctgcctgtatctgcattcaaggattatgtggacggcaccactccatccggttcctcagcatttgagaaacgcggtattgccgtaaatattcctgtatggaatccagaaaactgtatccagtgtaaccgctgtgcttatgtatgtcctcatgcagtcatccgtccggttgccctgacagcagaagaagctgccaatgctcctgaaggaatgaagactctggatctgaccggaatgaaagaatacaaattcacaatggctgtatctgctcttgactgtactggctgcggttcctgtgcaaacgtatgcccgggcaagaaaggtgcaaaagcccttgttatggaaaatatggaagccaatgtgggcgagcagaaatacttcgattacacagtagctctgcctgagaaggctgacgttatcgcaaaattcaaagaagctaccgttaagggaagccagttcaaacagccattgcttgagttctcaggtgcttgtgcaggctgcggcgagacaccttatgcaaaactgatcacccagctgtttggcgatagaatgtatatctccaacgctactggatgctcctctatctggggcaactcttcaccgtccacaccatacactgtgaacgcaaagggacagggtcctgcatggtccaactctctgttcgaggacaatgctgagtttggttacggtatggttctggctcagaaggctatgcgtgacggcctgaaagcaaaagtagaagatctggttgcaaatggtgagaacgctgacgtgaaggctgccggacaggaatggctggatacctttgcatgcggcgcagcaaacggtgcagctactgagaaattagtggcagctctggaagcatgcggatgcgacaaagcaaaagagatcctggctcagaaagacttcctggctaagaaatcccagtgggtattcggcggtgacggatgggcttacgatatcggattcggcggtgttgaccatgttctggcaagcggacgtgacatcaacgtaatggtattcgatacagaagtttactccaacacaggcggacagtcctccaaatctacacctaccggtgctatcgctcagttcgctgcaggcggtaaagaagtgaagaagaaagacctggcttccatcgctatgtcctatggttatgtgtatgtagctcagatttccatgggcgctgacttcaaccagactgtaaaagccatcgcagaagcagaagcttatccgggaccatctctgatcattgcttacgctccatgtatcaaccatggtatcaagaagggtatgtcaaaagctcagactgaggaagaattagctgttaagtgtggatactggcacaacttcagattcaatcctgctgcaaaagcagaaggaaaaccagtgtttactctggattccaaggagccgaatatggaagattaccaggcattcctggacggcgaggttcgttacaactctctgaaacgccagaatcctgaaaaggctgccagactgttcgctaagaatgaggcagaggcaaaagaaagatatgaatatctgaagaaactggttgctctgtacggcggagaataattttccgggccaaagcagaaccctgtgttcagaaataaatgaataaaaataaggcggagtcttttgtggactccgtcttgttttggtcatgggaagctttcagagcctctgtgataagctttgggcaaaacttaaaaattcttaatatcgcttgacaaacccggcctttaggcattaatgtatgagggagtaataatataggggaagaaggaatatgtatggacttattgtcggtcgtgctgccggcttataatgaggagctgaatatccacaaggccagtgaagtgctcaaagagatactggagggcgcaggaattgcctatgagctggtttttgtaaatgacggttcctcagacagaacctgggaagagattaccaaggcgggaggggagaatccttgtgtgaccggagtgaagttttccaggaactttggcaaggaggccgctgttttcgcaggactggcccaggccagaggaaacgtggtggcggtcatggactgtgatctgcagcatcccccggaaacattgcttgagatgtacaagctgtggcaggatggctatgaggtggtagaaggcgtcaaggagagcagaggcagggaaggaatccttcacaagaaaagcgccggtctcttttatggaattatgtccaaggccactaaaatggatatgcagaacatgtctgactttaaaatgatggaccggaaggtagttgaggccattttgtccatgcctgagcggaatatgtttttccgggcaacctccaactgggtgggctttcgcagcaccacagtaagcttccaggtacgggagcgggaagcgggggagtccaaatggtctacctggtccttggtgaaatatgcatttacaaatattgtggcttttacaactgcaccgctgcagttcgtcaccatcggaggctttgcctgcctgctgggctctgtggtgcttttgatctattcactggtacagtattttaatggaaaagcggtggaggggtacaccactacgattattttactgctgtttatcggcagcggcattatgatgagcctgggaatcattggctattatatagctaaaatatacgaagagaccaaacgaaggcccaggtatttaatttctgagattataagagagggcacaaatgcaaatgaagatgcgatccatgatacgaaagctgtatgataattctgtgatccgatacgtatttttcgggggctgcactaccctggtgaatctgatcgctttctatgtgctgcgccaggcaggtatggagctgaatgtggccaatgtgatatccattatcctggctattctctttgcctatgtggtgaactccagatttgttttcgagcaccggtgcgaaagtgcgaaggagcattttcagacctttggcaaattcgtcagtgccagattagccaccatggtcatagaagtgggcggcgtgtggctttttgtatcggctttaaatatgaatgacatgctggggaaattcctcatccagtttgtggtgctggtattaaattatgtgttcagcaaattcctggtatttacatccaggaaggaaaaaagctgaaggaagagctttgctggccagatagaaccgggcggcgtagatttttctaataaataaggtatgagaataaaagtcctgacaaaattcttgttttttatgaaggagcccatagggaaacggggtccggagaaaatgaggcgttgtcgggacttggttttttttgcgatttatggtaggatggtaccaggaaaataaggaggcgtaaaaatgaccatagaagaggtaagagaaagaatccgtcctttggataaacgggcgatggaggatgcacaggcacgctggaacagcattgccaagccccttcattctctgggagtgctggaggatatgatcatacaggtggcgggcatgactggcagcgccaagattgatattggaaaaaaggctttggtgaccatgtgtgcggacaacggagtggtggaagagggtgtcacccagtctgggcaggaggttacggctatctgtgcagagcagttcgttctggggaccaccacagcctgcagaatgtgcagccactgcggggcggatctgtttcctgtggatctgggaatggtgacagatacatcagccaggaaggacctgaagattgcctatggcacgaaaaatatggcaaaggagcctgccatgaccagagagcaggcggtgaaagcagtggaggcagggatccaggtggcagaagagcttgtgcaaaaagggtaccggatgctggcaactggagagatgggaatcggaaataccaccagcagcagtgctatggcctctgtgtttctggagcagcccccagaggtgatgacgggcaggggagcagggcttaccagcgaaggtctgaggcggaaaatttctgctatagagaaggccataaaccttcatcatccagataaggaggatcctttggatgtactggcaaaagtgggcggctttgatattggaggaatggccggagtgtttctggggggtgcagccctggggattccggttgttattgacggatttatctcctgtgtatctgcacttttggcccagaagctgtgtcccggctgtgaaaattatatgatcgcttcccacgtgtccaaggagccggcggcccgtctgcttctggaggcattgggcaagaaggcctttattcatgcagaaatgtgtctgggagagggcacgggggcggtagccgcatttcccctgctggacatgagtgcaatgatttatacgactatgggaactttcggagatatttccctggagaattataaggagctgtcctgatgatctatttaataaccggaggaagtggaagcgggaaatccgcctatggggaagacctggtgcttacacttggggagtacaggagagtttatattgccaccatgtacccttttgatgatgagagccggaaaaggatcatccgccacaggttcatgcgggcagggaagggctttgagacagtagaacagtatacggatcttcagtccttgaatttagaagatgaaccggtggttcttttggaatgtatgtctaatttgacagccaatgagatgtttcaaaagggaggtgccggggaacacacagtggaggctgttttggccggagtgaagcacttagaagagcaatgccggacactggtgatcatcaccaatgagattttttctgaggcagcggcttatgagggagaaacagcacagtaccaggaatatctgggcaggatcaaccaggagctgagtaaaagggcagccagggtcatagaggtggtctatggaattcccattgtgttgaaaggacaggaataatatgaagaagttttggaatagttttaagattgccttttccatgtattccaaaatccccatgccatccagcgactggtctacagaaaatatggaatatgtcatggcgttttttccattggtgggagccgtggaaggggcgctgctgtatgttctggcctgggcgatggagcgggcagggcttggaggcggaaatctgctgtgggcggcagttttgacggtagtcccccttatgatcacaggaggaattcattttgatgggtttttggatgtgtcagacgcaatggggtcctggcaggagcgggagcggcggctggagattttgaaggactctcatgcaggggcttttgccattatccggggactcatgtacgtggttctgtatgccggggcggcaagtgtgttagaagcgaggacttatctgcttttaatccctgcacttaccttaaaccgggctgtgatctcttatacagtggtcacctggaaaaaagccagcgcaaaagggactgtggcccagttttcaaaggcggccagtaccagggtcatacaggtatgctgtgtattgctgggaacgctggctttggctggagctttgtggatcaaaccggctggggcggccgctcttttggcaggcagcgcaggtaccctggtttattaccgtcatatgtcagaaaaatattttggaggaatcaacggagatctgtcaggctggtataaccaggtgagtgagctggtgatgctgctggccctggcagtggtgacccttgggtatggaggaagcttatggaattgatcattggaggtgcatttcaggggaaactggcttatgcacgagaattgtatccggatatagaatttctggacggggaaagctgtacctggaaggagcttttggcagcaaagggtgtatacaattttcaggaatatataagaagagagttaaaggaaggaaattccactcaggagctggcccaaaggctgattgaggaaaatccccatctggtgctggtatccagagaggtagggtatggtgtggtgccggtggatgtatttgaccgggcttatagggaggccgtgggccgcacctgcacagagctggctgctttttcaaaaaaggtgaccagggtggtgtgcggaatcccacaggtgatcaagaatgcttgagctgttactgatccgtcattctctcacacaggggaacctggccaaacgttatataggaaccacagatgagcccttgtgcccggaggggatcgcccttcttaagggaatcatgtatccgtccgtggatcaggtgtttgtaagtcccaggaaacgctgccaggaaacagcgaggcttttatatccaggagtggcgtatactactatagaagagcttggggaatgtgatttcggagaatttgaaaataagaattatctggagttggagggaaatccacggtaccaggaatgggttgacagcaatggaaccttgccctttccaggaggagaaagccgggaggaattttgcacaagagttttgacgggctttgacaaagtcgtggcagtctgcgcagaacatgcacatgccagtgcagctttggttgtccatggaggaaccatcatgaatctgatggaaacctatctgggacaggagggcagtttttatcagtggcatgtggagaacggccggggataccaagtgcggcttatggaaaaggaatggctggcaggtaataagcagatgcagcttattgataagctgtagccattggcgcagcgggttacaggcaatgatggccgggaaggtggctgctggggcacaatagtgagacggcaggtgtccggcgctttgataagaatacgccctggcgtatttgaatagggaggaataattatgataaatcggattgagctgaaggccagaggaaaaagtgcctttatgaaaaatttttgggcggctgtcttggtcagctttctgatcgcatttttggggatcaatcaagttactactgcggaacagcggtttaaccgtcaggaatatacgtatgtagatgacaatcacagaacagagactgtgggacttggcagatatctgtgggtggagctcacccagggacatatttttaacagcatctttacctttatgtttgcagcgattctttttttgatcgcgattttagccattgtcctgcgggtgctggtgctgaacattattgaagtaggagggcggaggttctatattcagaaccggtacagcaatcccggtgcgggcacagtgtttcagcctttccgggagggatattactggaaccaggtgaaaattctatttttcagggatctgtttgtggctctttggtccctgctttttgtcataccgggagtggtgaaggcctatgaataccggatggtcccctaccttctggcagaagttccggaaatggacagacaggaagcctttggaagaagccgggagatgatgcaggggcacaagatggatgcgtttattctggatctgtcctttataggctggctgtttgttggaagcattacttgtggggtggtcaatttgttttttacaaacccctatatggatgccaccaatgctgagctgtatgagacgctgaaatgggctagataaacttaagaagatttaaaaattgttgtaaaggaaatgaccggaaaaaattggtcatttctttttttattacataataacagttgaagcgggcttgcccactttgttttaggaaggaataacgattgtgtgtacagggagagagttagatgttattactaaaaaaatcgtatatttttgtgcatgattttatatattccaggcaataccaaaaaaaattagaatgccaaaaattttttgcatttttctattgaaaagttctttgggatatgttacattgatagtagaaaatctccaataaagagggttaaaattaccgggagattgtgaaaattatatatttttaagcaaggaggataccacatgcttattattggaaacggaagaatgattacacgggacgcatccaacgcatttatggagaatggtgcagttgcaatggatggtaacaccattatgatggtgggggtaactgaagaggtaaagaaggcttatcctgacgctgaatttgtggatgctaagggtggggtcattatgcccgctttcattaatgcccatgagcatatttacagcgcatttgcaaggggactgagcatcaagggatacaatcctcaaggctttcttgatattctggacggtatgtggtggaccattgaccgccatcttacactggagcagaccaagctttccgcttatgccacctatattgattccatcaaaaatggtgtgaccactgtctttgaccatcatgccagctttggccacatcaccggctctctaaatgctattgaggaggcagccaaggatttagggatccgtacctgtctgtgctatgaaatttctgaccgtgacggcatggataaatccagagaatccgtgatggagaatgtgaattttatcaaacatgcccagaaggacgacagtgatatgatcgccggtatgatgggaatgcatgcatcctttaccatttcggatgagactatggcactgtgcaatgagctgaagccggagggcgttggctatcatatccatgtggctgagggaatctatgatctccaccagtgcctgaaggagcattccaaacggatcgtggatcgtctctatgactggaatattttaggacccaagacccttctgggacattgcatttatattaatgagcatgagatggatctcattaaggaaacagacaccatggtggtacataatccagaatctaacatgggcaatgcctgcggatgtcctcccaccatggcactggttcataaaggggttgtcacaggccttggaacagatggttatacccatgatatgatggaatcctggaaggttgccaatgtgcttcataagcatcatctgtgcgatccaaacgcagcctggggagaggttccccagatgctctttgaggggaatgccaagattgccaatcgttatttcaagaaagaactgggcgttctcaaaccgggagctgcagccgatgtgatcgtactggactatgatcctcttactccaatgaatgaaaacaatgtaaacggccacctgatgtttggtgtgaacggcaaaaatgtggtgaccacagtgggcaacggaaggattcttatgaaagaccgtcaggttctggtggctgacgaggccaaggtaatggctgactgccgtcaggctgcaaaagaactggcagatgacattaacagcggtaaataaaataggaagaggacaggaggatgccgggagcagtaccagggtatcttcctgtatgttgggattttacagataattttacagatagatgaagaaaaaataaatgggaggaaattatgagtgatattatgacctgtatgtcctttggacaattgatggattgggttttggaagaaaagaagacaaagggtactgtattcggtctccacagaccttatgaggcagagcctgagaaaaaaatgagtatttttgagagaaatctggagaccccaattggaccggccgctggtcctcatacccagctggcccagaatattattgcatcctactatgcaggggctcgtttctttgaattaaaaactgtccagaaaatggacggtgctgagcttgctgcctgtgtaaacagaccttgtatcctggcagaggatgagtgctataactgtgagtggtccacagagctttatgttccccaggcaatgggcgagtatattaaggcatggtttattctccatgtgatggctaaggaatttggccttggagatcaggacggcttccagtttaatatctctgttggttatgatctggcaggaattaaggagcccaagatcaatacctttattgacacgatgaaggatgccagcggcagtgaagtattcaaggagtgcagacagtggcttctggacaatctggaccgctttgagaaattgacaaaagaggatgtggaggccatcccggcagaggtatgcaattctgccaccatttctactcttcatggctgtccgcccaatgaaatcgaaagcattgccaaccatctgttcaaagaaaagcatttaaatacctttattaaatgcaaccccacacttctggggtatgaatttgccagaaagaccatggatgacatgggttatgattatatggtattcggtgatttccatttcctggatgaccttcagtacaaggatgccatccccatgttcaaacgtctcatggctctgtccaaggaactgggactggagttcggcgtgaagattaccaacaccttccctgtggatgtaacaagaaatgagcttcccagcgaagaaatgtatatgtccggaaaagccctgttcccgctttccatctccctggctgccaagctgtcccgggaatttgacggaaagctgcgtattgcctactccggcggcgctgactactataacattgataaaattgtgggctgcggcgtgtggcctgtgacagtggccaccacactgctgaagccaggcggctatcagcgttttacacagatggcacagaagatcatggcccagggagtaagatcatgggatggcattgacgtggaggctctggaaaaattggcggcagatgccaaggtagatgcccaccatgtgaagaatatcaagcctcttcccaacaggaagaatgacaaacaggttcccctcctggactgcttctttgctccatgtgaggaaggctgccctatccatcaggatatcaccaattatgtgaaactggctggagaagaggattatgaaggtgctctgcgggtgattttggagaagaatccccttccgtttatcacaggaaccttatgtgctcacaattgtatgagcaaatgtacccgtaacttctacgaggagccggtaaatatccggggaaccaagcttttggctgcccagaagggttatgcaggggtgattggagaagtaaaggcagcagcagccacaggaaagaaagcagccgtgatcggaggcggacctgcaggtatggcggcagcgtattttctggcaagagctggtgtggctgtgacaatttttgaaaaagagcagaagctgggcggtgtggtccgcaatgtgatcccgggcttccgtatttccggggatgatattgataaggatgtgtccttcctggagaagctgggtgtggaaatcaagactggcgtccaggtggcaagcgtggctgaggtgaaagcccagggttatgacacggtcatcgtggcagtgggagccagcaagcctggaaccctgaagctggaaaaaggggagagcatcaatgcactgaaattcctggcagatttcaaagcctcagagggaaatctggatctgggtaaaaacgtggtagtcattggcggcggcaacactgccatggatacagcaagagcggcaaaacgcaccaagggcgtggagcatgtttatttggtatacagaagaaccaaacgttatatgcctgcagcagaggatgagcttttagaggttctggaggaaggaatcgaatttaaagagcttctgtccccagtggcactggagggcggcatgctttcctgcaaaaagatgcttctgggagccatggatgcctccggacgtgcgggagtgacagagacgcaggagattgagaaggttccggcggacaccgtgatcgtggcagtgggtgagaaggtgcccacagagttttaccaggcaaacggcatgaatgtaaatgagcggggcaaggcaaaatacaatgacaagactatggaatccagcgtggaaggtgtgtatgtcatcggtgacggtgccggcggagctgccaccatcgtggaaggaatccgggatgccatgcttgcggcagaagcgatcttaggagcaccggctgcgaaagattatcccacggttggggaagatgaaaaatgctttgccaaaaaaggaactctgattgagagtaaggatgccgaaaaggaaagtcagcgctgccttacctgtaataaggtctgtgagaactgtgtggacgtatgtccaaacagagccaatgtgtccatcaaggtgcctggaatggagatgaaccagatcatccatgtggactatatgtgcaatgagtgcggcaactgtaagagcttctgtccttatgcaagtgctccctacaaagataaattcactctgttcgccaatgaggctgatatggaaaacagcaccaacgacggctttacagttctggatgcagcagctaagacctgtaaggtacgctttatgggcaatctggtgacctgcaaggccaatgatccgcaagataagctgtacgagggcctgaaaaaactcatgagcgcagtaattgatgattataactatttattgtttcaataaatgagaattaaatagaagctttttcaggggcaggattcctgtctctgaaaataagcagatgaacagaacagggggaatgattatccggggcggcggtccggcgatcatcccctttgttgcaaaaggatttttataggaaaaatagaaaggaggctatgtatgtacagcttctttgtaaacggtaaggaatgccaggaggagaaggacggcaagcttctgccctttctcagggacatatgtaagttaaagtctgtaaaggatggctgcagcgagggggcctgcggtacctgtcatgtgctcatagacggaaaaccaaccaaggcctgtgtgcctaagctgtccaagctggaaggaaagcatattctcaccatcgagggctttgcagaagaagaaaaagagctttatgtgagagcgttcggagaagcaggggcggtccagtgcggtttttgtatcccgggaatggtaataagtgccaagggacttctggataagaatccggatccaaccagagcggaggctgcagatgcgatcaaaaataatatctgccgctgcactggctataagaagatcattgatgctattttgttagcaggaaaatataaaagagaggggcttccgcctcagaaggactatacctggaagctgggagagcgggttcccaggctggatgtgcaggagaaggttcttggttatggagagtatcccgatgatgtggaagtagacggcatgatctacggcagcgctgtgcgttcccaatatccaagagctcttgtgaaagccatccacacagagaaagccaaggccctgccgggagtggtaggtgtgtttacagctcaggatgttcctggaagtgtgaaggtgggccatctgaaacaggactgggacaccatgatccctgtggggaagatcacccactatctgggagatgcggttgccttggtggctgcccagacgaaggagattctggaggaagccaagaagctggtggaagtagagtatgaggagcttcccatggtgaaggatccctatgaggccatgaaggaggatgctcccaaggtgcaccaggacggtaatctgctggcccattggcatgtacaccgaggagacgcggatgaggccattgagagatcaaaatatgtgcttaaagagaaatttcatactccctggacagagcatgcgtttctggagccggaatgtgcggtggcgatcccggatggagacggggttttgatctattccacggaccagggcgtatacgatacccagcatgaatgtatgactatgcttggcctgcctgcccaaaaggtaaaggtacagaacaagctggtgggaggcggtttcggtggcaaggaggacgtgactgtccagcaccatgcagcccttatcgcctatttgaccaagcgtccggtgaaggtaaagcttaccagagcggagagtattctgatccatcccaaacgtcatcccatggacatggaatttaccatgggctgtgatgaaaacggcgtgatccagggtgtgaaagccacggttattgccgacacaggggcttatgcatcccttggggggccggtgctgcagcgggcctgtacccatgcctctggtccttaccactatgacaattttgatattgacggaaaggcatattataccaacaatcctcccgcaggtgcattccgtgggtttggtgtgacccagacctgctttggagtggaaatgcttctcacaaagatggcagagaaggtgggaatctctccctgggagatccggtaccgcaatgccattcgtccgggagaatccctgcctaatggtcagcttgtagatgactccacagggcttgtggaaacactggaggcagtgaaggaggtctatgaaaagaatccatacgcaggcattgcctgtgcaatgaaaaacgccggggttggggtgggcctgcctgactggggacgggccaagctgttcataaaggacggagtggtgcatatccgggcaggtgcctcctgcatcggacaggggctgggaactgttctggttcagatggcctcagaacagctgggactatccagaaaacagcttttttatgacgcatcaaacacctacaatgccccggattccggaaccacttccggatccagacagaccttgatcaccggtgaggcggtgcggagagcctgccaggagctgaaaaaagatctggaagggtcttccctggaggagctggagggaagagagtatctaggtgagtatctggccaagacagacgccatgggatctgatattcctcacccggtttcccatgtggcctacggttatgcgacccaggtgtgtatcctcagtgaggatggaaccgtggagaagatcgtggctgcccatgacgtgggaaaagcggtaaatccattgtccgtggaggggcagatcgagggtggtgtgatcatgtcctatggctttgcattgacggaaaaatatccacttttggattgcaaacctactgcaaaatatggtacactaggattaccaaaagccaacaaaattccagaggttgagagtattattgtggaaaaggaagggctgaatgttgcgtgcggtgccatagggatcggggagattacttccattcccacagctcctgccatagccggagcttactacaggctggatggggaattccgtacttccctgccccttgagaatacaccttacgcgaagaaataagtttatattgaagtagcatggttcggagccggatgtagatcctgaggggaacttttttccttgggatccgtccggctttttattatcacagaggaagcggctggagacaaaacagccctgaattggaccatgccaggcaggttgtgtcaaaaaaaggaataagaggtgagaaatatgattggaaagagtgttccaagagtagatgcttatgagaaggtgaccggccgtgcaaaatttacggacgatatgatcttaaataagtgtctggttgcccgggtgcttcatgccaccatcggaaatggtatcgtgaaagaaattgacaccagtgaagccgaagccttggacggcgtagtaaaagtagtaacttttaaagacgtaccgaatcattgttatcccacaccaggtcatccctggtctgtagagctggcccatcaggatgtggccgacaggaatatcctcacaggcaggatccggtattatggtgatgatattgcggcagtggtggcagaggatgaggtgacagcgtccagggccctgcgcctgatcaaggtggagtatgaggaatatccggtggagattcatccccggagatccatgagaggctccagagaacccattcatctggacaagaaggagaacgttcttgccagcagcgaatattatatcggaaatgtggaggagggtctgaagcagtccaagacagtggtacataagagctataaaacccccattgtccagcattgtcatattgaaaatccaatttcctatgcctatatggataagggcaggatcgtggttgtgacctccacgcagattccccacattgtgcgccgtgttatcggccaggcgctgggtattccctggggaatggtgcgggtgatcaagccatatatcggaggaggatttggaaataaacaggatgtgctctatgagcctttgaatgcttttttgaccacccaggtgggcgggcgtgccgtgaagctggatgtgagcagagaggagaccttctgcaataccagaacccgtcattccattgaatatgacctcactgccggagtagatgaggaaggccgtcttcttgcaaaagagatgcattcttattccaaccagggagcctatgcctcccatggtcatgccattgctgccaacggtcttacagcctggaggctgcaatatgcctgtcctaatattatgggagaggcttacaccgtatacaccaatacacctgtggcgggagccatgcgggcctatggaatccctcaggccgcctttgccatagagtgttttatggatgacattgccagagagatccacatggatccgctggaattccgcagaaaaaatctcattgagggatactatgaggatgcctacttaaaacccattgcagccaatacaaacggtatcttccaatgcctggacaaaggtgctggatatattcactgggaggaaaagcgcagggcgtatgcagatcagacaggagatatccgaagaggtgtgggtatggccctattttcctataagaccggtgtgtggcccatttccctggagatcgcaggagccaggatgatcctgaaccaggacggcagcgtacagcttcacattggagccacggagatcggccagggggcggataccgtcttttcccagatggcggcacagacccttcatatggatatctcggatattcatattcagacagtgcaggatacggattccaccccctttgatacaggcgcctatgcctcccgccagtcttttgtcacagggactgcggtgaaagaatgtgcggagcttctttacaaaaaaatcctggtttatgccagagagctggttccctatgaaaagcgtgcgcttaccatgaaagacggctggatatatgcggaaaatgataaggtgatgcctttaaaggagctggctttggaaagttattacagcctgacccattcttctgtgatctcagcggaggtttccagacaggtgaagaaaaataccattgccaccggctgctgctttgtggaggtggaagtggatctgaagctgggaaagatcaaaattttagatatcatcaatgtccatgacagcggaaagcttatcaatcccaagctggcggaaatgcaggtccatggaggcatgtccatgggaatgggctatggactcagcgagcagctcattttggatgaaaagaccggacgtcctttgaacggaaccttgctggattataaattaatgaccaccatggacacgccggatctgaaagcagactttgtggagctggaggatcccaaaggtccctacggaaacaaagccctgggagagccacctgccattccaggcgctccagctatccgaaatgcagtgcttcacgccacaggagtggcatttgatgaaaacccattaacaccgcagagacttatcgaaggcttccaaaaggccggattaatataaaggaggggtgacggatgtatgacattgagaattattatgtggcagaatcagtaaaggaagcagttgccctgctgcaggaacatccccaggccagaataatttccgggggaagtgatgtgctcattaagatccgggaaggaaaatcagcggggatttcccttgtaagtatccatgacatccaggagcttaaaggcgtgtccctggatgaaaacggagatattctcataggggcagggaccaccttttctcatttgacaaaagaccctgtcatctgtaaatatatcaatgttctaggtgaagctgtggatcaggtgggcggcccgcaggtgcgtaatgtgggcaccatcggcgggaatatctgcaatggagccgtgagtgcagacagcgcacccacagtattttctctggaagcagtgctggagatcgcaggtcctgggggtatgcgtaccgtgcctgtggaggaattctatctgggtccgggacgggtggatcttaagcctggggaagtactcacgaaaatcaggatacccaggaaaaattacgaggggtaccagggacattatgtgaaatattccatgcgtaatgccatggatattgcaaccttaagctgcagtgttgtaagcagggtaaacctggacaaaggcatcctggaggatgtcaagatcaccttcggagtggcagccccggtacccctgcgctgtcgaaaaacggaagaggcgctgaagggaatggcccttgggcaggatttatatgataccattgaaaagaaggtccgggaagaaatcaaccccagggattcttggagggcatccaaggctttccggcttcagatcggtggagagatcgcgcgccgggcattgaagcgcacagtggaattggcagcaggaggtggaactctatgaaaaagaatatgcggctggtagagtgtgttgtaaacggaaaagaagtggcagaatatgtggatgtgagggaatctcttctggatatgctccggaaccgtctgggccttacctcagtaaaaaaaggctgtgaggtgggagagtgcggtgcctgtacggtgatcatagacggagaaaccgtagattcttgtatttatctggctgtgtgggcccaggggaaaaatatccgtaccctggagggcttggagagggacggcgggctcaccaggatccaggaggcatttatcgaagaaggagccattcaatgcggattctgtacaccgggctttgttatgtccgcaacggttcttctggagagaggggagaccttgtcccgggaggctatcaaaaagcacatggctggaaatttgtgccggtgtaccggataccacaatattataaatgcagtagaaaaggtaatgaaggagcaggaagctcaaaagagtgaggaaggctgaaaggtggggaaaagtcagtgacatatggaagctggaaaattatcggtatccgtggagcaggggatcttgccagcggtgttgcccaccgcctgcaccgctgcggttaccgggtatttcttctggaaagtgccagaccaagcgccatccgccggtgtgtatccttcagcgaggcggtctatgacggagagtcctttgtggagggggttctgtgcaggaaggtggacagcccctggcagtgtcaggaggcctgggaggcaggagagatcgctctactggttgatgagacggggcagggggtccggcaccttcggccggatgctctcatcgatgctatactggcaaagaaaaacctgggaactagcaaagagatggcccctcttaccattgccttaggaccaggcttcactgctggggaggatgtggattttgtcattgaaaccatgagaggccatgatctgggcaggatcattgaagagggcagcgcttttccaaatacggcagttcccggggaagtggcaggagtgtctaaggagcgtgtgatccatgcgcccgcggacggtgtgatctgtctgaaaagtaagatcagcgatcttgtaaaaaaggggcagatcctggcttctattggggatattccggtagaagcatcactggatggggttctccggggaattatccgggatggttataaagtgtcacggggaatgaagattgcggatattgaccctcgtgtccaggagaagaggaattgctacagcatttccgacaaggccaggtgtattgcaggaagtgtggttgagattcttctaaatcagggttgttattaaacgtgtgaaaaaagatttctgtctgaattttccagaaaaagggcggcgggaattgggcagagaaattgttgtacgaaaggtgtcaatatccaggaaaggatgaataggatgtgtgataaaaacaaatccttgtggagggagctgggtcttaccatggaaacctccagaatccttgcggcagtaggagggggcggaaaaaccagcctcctctttgctttggcaggggaaggagtgagagcaggaaaaaaggtgctgatcactactacaacccatatggcctatgagcctttgtgtccctttgtggaaggaggagaccgggcggctttggaagtctgttgggaaaaatttggctatgcggtggctggccacagggaggccaatctggagaaaatccgggggctgtcacaggaagaacggctttttgcacagatgggggcagaccttgtactggtggaggcagacggctccaagagatttccgttaaaggttcctgccacacatgagccagtgattccccaagaagcagatacagtggtgggagttttgggactggatgccctgggtgaaaggcttgacaggtgctgtcacagaccaggagatgtggcggctttcttgaaaaaagagagttcctgttttgtggacgtggaggactttgtaaaaatcgcaggctcttgtgagggtctgagaaaacaggtggggacaaggaagtttgttatggttttgaataaggcggatgtggtgagagacacagagagtgtggggaagatctgctcacaactggaaagacaggggattgtgtgcagagcgttatccctgcaggaatatttatgagatgtgccacggaatgcggcagcgcagctgcatattggagcactgcggcgtagatggatcatgttgccgaaggcaggtaaaactgccacgaaaggaggagagctggatgaagatttgtggaatattactggcagcgggcagcagcagaagatttggaagcaataagcttcttcatcctttggatggaaagcccatgtttctctatgggatggagcagctgtgcagatttcgggagcagacccaggaccaggtgtcccttacagtagtgacacagtatgaggagattgcctgtgaagggcgggagaggggcttttttgctctttttaatccccattctcagacagggatctcttcttcaatctccattggtataaaggcaaatcctggatttgacgcgtatttgttccaggtggcggatcagccctggatacaggccgaaaccttctgcctgttggttaaagccctgaaggacagtggaaaagggatcgcctgtgtcatccatgagggaaaaaccggaaatccctgcattttccgggcagcgtatgtgccggagcttttcaagctgaagggggatgtggggggcaagcatgtgatcgtgtctcacagaaaggataccaccctggttcctatcttggattccatacagctgaaggatattgaccgtccataaaggcattgtgtaaaccttggcatgtgtgtgtaagaaaaagttataccgtgaaaagtgcctgtaagaaaagttggagacttatgaaatttatgttataatgaagacctgaaaaaattctaaaataggaaacaggagggaagggttttgcaggctcatcagacagatttttctaagggaagcgtgtacaggaacatcctggaggtagctgtccctatgactattgcacaggttttaaatcttttatataatattgtggacaggatgtatttaggaagaattcccaagacaggtaccctggcccttacgggagtaggactttgctttcctgtgattaccctgatctctgcattcaccttgctttttggcaacggaggttcgcccttatgcgccatggagaggggaaagggaaatgaggaggaagcaggaaaatttatgggcaataccttttccatgctgctcatcgtgggtgtgatccttactggggcagggcttgctttttataagcccattctttatctgttcggagccagtccggtgacttttccctatgcccagagttatatccggatttatctggcaggaacggtttttgtgatgatctctcttggaatgaatccctttattaacagccaggggtttggaaatatggggatgtttacagtgctcatcggggcggttctgaatattatcctggatccgatttttattttcggactgcatatgggggtgaagggggcagccacagccaccattatttctcagttttgttccgcagtgtgggtgcttcgctttctcactggaaagagggtggagctgaggctttgcagacaggacatgcggattgagtggaagagggtgtgctccattatgtccctgggaatgtcagggtttatgatgagctttaccaatggattggtacaggtggtgtgtaatgccacactgcagacctacggcggagatctgtatgttggtgtgatgacgatattaaactctgtgagagaaatttttacaatgcccgtgatgggacttaccaacggcgcctctccggtgatgagctttaattacggagagggagcgtatgaaaaggtgaagcaggccatacgattcataactctggtatgtgtatcctttacgctggtggcctggggaattctcaggattgtgcctgaagtgtttatccggctgtttaacagtgatccggcacttgttcaggccgcggtgcctgcacttcacatatacttttttggattttgctttatggctctgcagttttccggtcagtgcgtgtttgtggctttggggaaggcgaagaaggccaccttcttttccctgtttcgaaaagccatcattgtggtgccgcttacgctgcttttaccaaaattgtgggggctgggagtagatggtgtgtattgggcggagcctatctccaatctgattgggggaaccgcctgttttgtcaccatgcttctcaccatactgcctgaactgcgtcagggcagcggcaagaataggaattgatgtggagaacaattgattttagaaggatataagaatctttatttttttgtatgatacacttcttttatgaattcttcttggagctggtcatttatttcccggtccatttctccgttaaaccgaagaatacagtaatccaaaaaggcaataagggctcctaaaaatataagcagaatttttaacataaggaaaacctccggacaaattttctttttattattgtatccagcgatcataggggatattcaataaaagtcaggggattttattaggattgctgccccggcatgaggaccagccggggcatatgtgatgggtagatgggcttaataaaagaacttttttggaagcatatttaatcttgaagatgatattcttccaacaactgagtcaacaatactggattgttctcaattttagaaagctcctccagacggttgtctttttgtaaatgaataaggagttttgtgatcaggagaaagctttgttcttttccttcctgcagtcctttctgaagtccttcttcccttccctcacgaagggcctgctggcggagccaccgccgttcatttcttcttacgatttcatcaaattcatctactaacaaattcatcagctcctctctgcttttactgaatttttgtaattccatacaaatcgtctgtagttccgggtagttggcagctatgtgtgctgccgaaggggcgtttacatcggagagaaaggtcatccaggcatacaattcctgttcctggggtggataagagttctcctgccattgtctggcacatttatccagctccacatagaccacgttggatatggagggaaggctggcaccagtgtttgtggacactaggcggtaatgaattccacaggcgctgttgtggaagtcctgaggagattcctttagaaaaactgccagataggcaggaggaatgtcaccgtatgaaaaatcgctcttctttttcttctcctccacggaaaactgcagcattaccaggtcagcggcgtaaatatccatccgttctaagaaaaaaagatgaagatttttggacatttccatgtcaaaaacaatgtctcgttccattttagataagacatccgctatggttttcttggaataaagagatgccttgggggtttcttccttcatagaggatcgcacctgcagttcttggtggaagagaagacggaaaattttttctaccctttccggatgcagatccccgtcaaaaattttcttaaaggtgctgtcatagtatggctgaggcagccgtttttctttcaggattagagaaaattcctcttttaagctttcaggcgccgggtcaggcagccaaaggccagaatcttcttctggaaaaaaatagtcatacatatagttcctccttttatattagcccaaaacgggcttgaaatcaatggggttttacacaaacaaaaaagaaaaatagaaaaaggataccctaactaccctaaaagagacatataagagccatgattttaaggacgtatcatatgggatgatagataggaaggcagacctgatatggaaagcatgggaccttcagtggaaaattttgttggagtacacatcgaaataaacaaatagaaaatgaaaaccgtaagagaatgtatagataaaaaatctgttaagattaagaattagtaaatatcaaggattagtcaagatcaaggataccatacgcaccctatgtttgacaacagaaaatcatcgacaaatctaagaaaaaacgacaaagtgaaaaagcaaagagaaaaaacaacaaagagaaaaaaacaaagtaaaaacaacaaagtgaagataacaacgaagtgaaaaaacgaagtaaaacaacaaagtaaaaaataaagtaaaaaaaaacaaagtgaaaaaacaaagtaaaaaaacaaaataaaacaacatagtgaaaaaaaagagtacgaaacaaggtgaaaacgatatataaagcataaatatttacaaacaatacacagggaatgcgccccggataatccggggcgcatgtgtaagaggtatttatcattaaatggatttgttaaagatgaatcttggtgccggttttgccctgaataccatccttggctttttccagaagggtgatcatggctgtgcggccggcaccggagctggcgaagtccacggctgcctgaacctttggcagcatagagccaggtgcgaactgaccttcatcaatatatttttttgcatcagatacagtcaggtcatccagccactgttcgttttcctttccgaagttcacggcaaccttttctacagcggtgaggatgataagcatatctgcatccagctgtttagccagaagacagctggcaaagtctttatcaataacggcgctggcgcccttcagatggtctccgttcaatacaacgggaattccgcctccaccgcagcagatgacaattttgttggcatctaccagggagttgatggcatcctgctccacaatctccacaggcttaggggaagccactacccggcggtagcctcttccggaatcctccttcatgatatggccgtaagcggcagcctggcggtccgcctcctcctttgagaggaagcggccaatgggcttggagggattctcaaaagcaggatcatcgggatccacacggacctgagtgaccacagtaactacaggggttctcataaatccacgtttgcgcagttcctcccgcagggcgttctgcaggtcatagccaatataagcctggctcatggcaacagacacagacagaggggtgttgggctgtctggaatcctccctggaaagggcgtccatggcattgttgatcatgcctacctggggaccgtttccgtggacaaccacaacctgatgtccctcttcaattaagtcgcaaagagctctggcggtagtttttacagctaccatctgttcggggagtgtattgccaagggcatttccgcccagggcaatgacaattcgtttccgcttatacatggcgagcgcctccttatctctatttcaggattctgggagctgcttttacttccagtttcttcaggatatcctgtacattttcgaatttagacagcatgatcatggctgcgatcacatatggtttgaagctggcttctttgtacagagggattctgtagcggtcgaatacagaggcatccacctctccagtctcacagctcacaccagtgatatcagcaggcaggcagtgcaggtacagagccttgccgtcttttgtggtcttcatgagctcttctgtgcaggcccaatccttgtgctgggcgttctgtgcaagaagctctttctccagcttgtcgattccgtcaaagtcgccttctccgtacaggttggtacgtttttccatggcagcgaagggagcccagctcttaggatatacaatgtccgcatccttgaaggcttcttccatgctgttggtcttcacaaaggttccgccggaagcggcagcgttcttcttggcaatctcctcaacctcaggcatcacatcatagccttctggatgagccagaactacgtccatgccgaaacgggtcatgagtccgatcacaccctggggaacagacaggggtttgccgtaggaaggtgagtaagcccaggtcatagccagctttttgccctttaagttttcaacaccgccgaattcatggatgatgtgaagcatatcagccatacactgggtgggatggtccacgtcacactgaaggtttactaaggtaggtctctgctccagaatgccatccttgtttccttctgatactgcgtccataaattccttctgataggtgtggccttttccaatgtacatatcgtcacggataccgatcacatcagccataaaggaaaccatattggcagtctcacgtacagtctccccatgagcgatctgggatttcttttcatccagatcctgtacctcaaggcccagcaggttgcaggcagaggcaaaggaaaaacgggtacgggtggagttgtcacggaagatggagattcccaggccgctttcaaatactttggtggagatgttgttttctctcataaagcgaagggcatcagcaacggtaaacacagcttccagctcatcatccgttttgtcccaggtccagaaaaagtcgttgttgtacatttccttaaagttcaggctgttcagtttatcgatataatcctgtaaagttttcataattttataatctcctttatgatgaaatagaatttatttttatgttcctccggcagtatgttccaaggaaatcctgccggaggaatatttatatgacggtgtttgttacagcgtggtcaaatacactggatagaggtcagtctttgcagtaagcggttggaagtgcggcgtacacagcggcgcatcttaccaggtcatccttccaggtcttctcattgggggcatgagcctgcgcctctgctcctggtccgaagccgatgcaggggatgccgttgcggcccataatggacacaccgttggtggagaaggtccatttgtcagtgagaggacgggcctttctcatttcctgggtttcggcatttcctaaacgttcttctccgtacagacccttgtaagcttcttccatagcctttgtcacagcatggtctttgggaatgacccaggtggggaagtagcattcgatgggataggtaagtcccttccaggaaggacgtgcatattcatacatggaaaccttcacatcttctccgtacttctgaacagaaggaagggcacggatctcatccaggcagctttcccaggtttcaccggctgtcatgcggcggtccagagaaacagagcaggaatctgcaactgcacagcggcttggggaggtgaagaagatctcagaggtggtaacagtcccacggcctaagaaacgggcttcttcccactgggagttgtatttggcatccagcattttcaccagacctttgatctgggtggaatcctgggcgtcattttcgttcagggcacgcacatcctgaagaatatcagccattttgtagatggcgttgtcaccgcgctcaggagcggaaccatggcaggaaacaccctttacgtcaatgcggatttccatacggcctctctggcctctgtagataccgccgtcggtgggttctgtggaaacgacaaagtccgggcggaccttatcttcgttgatgatgtactgccagcacagaccgtcgcagtcttcctcctgaaccgtaccggtcaccagaacctgatagttgtcatttaacattcccagatccttcatgatcttagctccgtaaaccgctgacacaataccgcccatctggtcagaggttcctctgccgccgatctctgtgtcagattcaaagccatcgtagggatcaaattcccagttgttgatatttccgattccaaccgtgtcaatgtgggcgtcaaagccaatgagggtttttccggttcccataaagccaaggacatttcccatggggtcgatttccactttgtcaaaaccaaccttctccatctcttccttgattctcataatatggccttcctcaccgcagctttctcccgggatcttaactaagtcccttaaaaatctggtcatgtcagcttcgtagccctttgcagtttccttaatttttgtaaaatccataatgatgatcctcccttatataaaatagcttttcgctgttgcttggtttcaagattttagatattgtcttatttactcagtgattcatctgtgccgtacaggccgtcccagacgatttctctgtagtggaccgggtcggtgtccccttctgtggagatgagcagtacattggaattttcgtccagcttcagggcttccttcagatccttggcatcttcctgggtgagggctgtgtagagaagtcccatgggaacagaaccagattcaccggagataacccggggatcgccgttaacgggattggcgtaaattcttgtggctttggcgctcatccagtccggacaggaggcaaataccgtcacatgatttttcaggatatcccagccgatggtatttccttctccgcaggcaagaccagccatgatggtgatcaaatcgccgcctacgtttaccagttctccggtctgcttcatggcagaacggtacagacagtcagcaacgccggcctcgcacaccaccataatggggggattgtctttgtatttgttggcgaagtatcccacaacagcccctgccagtgagcccacaccagcctggacaaacacatgggtgggacgctggatgccgtcctcttgaagctgtctgtccgcttccagaaccatggtgccataaccctgcatgatccaggtggggatttcctcatagccttcccaggcggtatcctggacgataatcccgtgtggggtcttggcagcctctgcggcagccatccgcacacagtcatcatagttcagctcttcgatggtgacttctgcgccttcttttttgatattatcaaagcgggttttggtggtgcctttgggcatacgcacaactgccttttgccccagacgcttggcagcccaggcaactccacgtccgtggtttccgtctgtggcggtgaagaaggtggcctggccaaattcttctcttaatttatcggaggaaaggacattgtatggaagttcgctgatatcccggccaagctccttggctatgtatcgtcccattgcataggagccgcccagtaccttgaaggcgtttaagccaaagcggtaggattcgtccttgcagtagatatttttgactcccagaaattcggcaaggccggagagcttctgaagaggagtgatattatactggggaaagcttttgtgaaattcatttgctttttccacgttttccacagacataatatccagatatttgtcatcggatttcgcaacattgttgaccgtccatttcagtccttctgtcatgaaaagtaacctcccttaaaaaattttgtcatagttaaaatttattaatgtttctagtatcatcatatcataaaatatggattttgcaagagaaaaatacaaaaatttttaggtttttcaaaaaatatttaggggcgttgtgccaagggcaaaaatgtgctaaaataatgcctagtacacggttaaaaaagcaggtggataacctgggtaaacggaggaaacagaacatggcgatttttcggcctttcagggcattacgcccgataaaggaggaggctttgcaggtagcagcccttccttatgatgtggtaacaacacaggaagcacaggagatcggaaaaaagaatccccactcctttctgcatgtggactgtgcggaaattgacttggaagggaaggtagattcctacgccccggcagtctatgaaaaagcaggagaaaacctgcgcaaaatggagaaagagggcattttgtcagaggataagaaagcgtccttctatatctaccagcttgtgcgtttgggaaaggtacagacaggggtggtgggggtcagctccattgacgactatctggacggcacggtgaagcgccacgagctcaccagaaaagaaaaggaggaggaccggatccggcatgtggaggcctgccaggcacacaccggccctattttctttacatacaggcagaaggaagaaatttcactttttcttaatgaatggaccaaggaccatgagccagcgtatgattttactgatgatttgggcattgtccagagagtgtgggtagttgatgaaaagagtgctgtcaataagcttgcacaggcctttggcagggtggaaaatttctatattgcagacggccatcaccgggcagccgcagcagtgaaggtgggtcagaagcgcagagaagaaaaccccggctataccgggcaggaagcctttaactactacctggccgtggcatttccggaccaggagctgaccatccttccctacaaccgggtggtaagggatttgaacggcagagatgtgaaggcatttctgggggctgtgaaattccattttgaactgatgcttatgcctgagggcttcccctgtaagcctatggaaacccattgtatgggaatgtacgtggacggccagtggtaccatctgaaggcgtggccggatgtgtatgaaggaaagacaccggtgcaccagctggacgtggaaattcttcaggaaaagatccttgctcctgtgctgggtattgaaaatcccagagtggatgaacggatctcctttattggggggaatgtgaaggccagagagctggagagacttgcagatgagacagggggagtggcctttgttatgtatcccacctctatggaagagctgatggccattgcagacgcaggagagatcatgcctccaaaatccacctggtttgagccaaagctgagaagcggtctatttatccataaaatgtagacagaaataaaattccccgcctgaataggtccagcatcaggcggggaatttccttttaacacattaaagctctatgatctttcctgcttctttgtcatagcggcagtattttccatgttcagagataaagggtgagtagctgttattcttcacatccttaatatagacgatcccggtggcgatcatgcgcactaaagagaagcgctcgctgagggaagaaatccactcataggtacgatttttggaggagtcacacataataagattgtatcctccgtcacaggcctcaagctggaaataaaccttttccgctgtctgtgggtctgcaaagacctggctttctatgtagctggaaaaattcttttttacaaattcgtggaagctggcagcagtgtacacctccttggaaacctcatcaacaatcttatccccgcggtccagacgggtcttaatgaccttcaaaacctcaacggtccagttgatgaaggaaatgctgctgtaattcatggattccagcagttcgctgattaattgcttggacaacacttcggagcgcacggcttcattatacaattcctgattcatacccttctcctttttcctgtgaattgatacttccattataattcccacatctgtaaaaagcaagaaaaagcgccattctcaggaaaaatccaggcagaaaaggcaggtgtgggcaggaaaattttccgtttatgctttttttagaaataggatagggatttcttagattttgtccacaaaaccctcataaaagaaaagtataataatggaaaaatgaaaatcacggggagttttacaatatgaccaatgaacagtattatgagctgatcaagccctatgacagcgccaagcagctgatcctcactaagcttgacacgctgaatcaaggcctgtatcaaagggaacagaaaggccctatacataacattcaggacaggatcaaatccaagaagagcattgagaaaaagctgaagaaactgggccactcggacagcgtgcagaattctaaggattatctgaaggatattgcaggaatccgggtgatctgctattttgtggacgatatctacaatctggtgaacgctctgaagcgccagagcgagctgatcatcataaaggaaaaaaattatattgaaaatcccaagccaaacggataccggagctaccatatgatcattgctgttccggtatattatttggacattatggagtattttcctgtggagatccagttccgcaccatgaccatggatctgtgggccagcatggagcacagaatctgttataagaaagcaccagagaacagggatactctggtggaggccttttgccagtatgcccacatcctaggacagatcgaagaacagtttgagacctacaatgagacagggaagctgcaggaaatcgaacaggttctccaggaatgagaaagcatcaaaagagctaagaatgagaaatcaccaaaagagttgttgaaggattcttccatatgaggtaagctggattaagaatggttccccggggccaacaagggcaggggagcggcaaaaagaggtgataggattgagtgagatcacagaggaatttctgtcaggcttttgcagaacctgcaacggaacccagacggtatgctgtgaatattcccaaagagagggacaaagatatctggagttcatggactgtgcccatgaaaactgtcttcaccacggggcctgcgagatttataaggaggctcatcggctgggagcaaagggagaaaattttgaaagaaactagagaggggaagaatttatatgggaaaaaattatcgttcagaactggtgggagcctttgggtgtcccattgatgaaaatccaacaggagttatggaggaggcggcattccgggcaaaaggactggatttccgctatctcaccgtgaaggtggaaccaggggatttaaaggctgccatggaaggagtaaaggcttttcatatgagagggatcaacttaaccattcctcataaggtggaggtcctgaaatatctggacgagctgtccccggcagctaagatcatcggggcagtgaacacggtggtcaatgaaaatggccgtctctggggtgaaaatacagacggcaagggttttttgatctccctggaaaaggagggaatcgccgtatccggaaagaatgtggcagtcttaggggcaggcggcgctgcccgggccatcggggtggaatgcgctctggcgggggcagcctgtgtgacggttatcaacagaaccccccagcggggacaggagctggcagacctgatagacagccgcacaaaggcccagggacggttccttctctggaagggggaggacctggagattcctcaggatacggacattctggtgaacgccacctccatcgggctttatccccatgtggaccagaagccgcctatgaattatgatagaattacatcctccatgatcgtcacagatgtgatcttcaatgaccccaacagtctgttccttcaggaagctgccaaaagaggggccagaacagtgaacggacttggaatgctggtcaaccagggggctttgaactttaaactgtggacaggggtggaagcgcctgtggatgtaatgacagagaccttaaagcaagaattcggattatagaaaaggacaacaagaaaaagcctgccaaagcgcaggctttttctaatagatggcccaaagcaggcaggttttttccctgaaaccattgtttatttattcacgtcaatgtagctatataaggtatatttggagataccgaaatagcttgccaccttatctccagactttgtgataagaaaggccccggagtcgttgagaaactggatggccttcaccttgtcctctttattcatcaagggcaccggtttgcccaccagggcaacggactcttcaatgagatgatccagcaggtcattgacactgtgagtgatctctttgggcttctcctctttattctcgggagtgatcagggcgtgaagggcattttcaatcatggtcagcttggtgatatcatagttgatgccaaaaatataatgcagggagccatcatcgtcccggatataagaggtgctgcatttcaggatttttccgtcagaggttttcatcaggtatcctgtatggtccgtcaggtcctcctccttgctgcgcacagcatcgaaaacagcagaagaggggccgtcccccacatcacgtccagttacatggccattgataatatagacaatggaatgttctggatcctttgtttttaaatcatgaatgactacctcacagtcaggtccgaactgggaggcaaggtcgccggcaatttgttttaaaacggtaagccttcccatcaggcattcctccttgtcatattgtcactgtttaccaaatggactgtaaaaggtgaaaaacttccatctctcccggtctttcaagagtctctcggccatagggcctgtggagaaggccgtcagcaaacagcaaaatcatggattccatgatacagattattttcttaaaatttattatagcataaagaaaaaaaataagaaatagattttacaaaaaaaatttgttaatctaaaattaattgtataaaaagcctcctggttgttgaagtgagaggaagagtgtggtatatttgtcctaagaataagcatggcaatggaaagatttcagataataaccgcagaaaggagtttttacatgaagcagatattaaaaaatggcacagtggtgtctggagaagggacacaaaaggcagatgttctcctggagggaggaaaaatccttcaggtggcccctcatctggaggaaccggatgcagtggtgtatgacgtggagggaaaattgatcttcccaggcttcatagacggccacacccacctggacctggaggtggcaggaacagtcactgccgatgattttgagactgggaccaaggcggcggtggtgggtggaaccactatggtcattgactttgccacccagaacaagggggagaccttaaaagaggcccttgccaactggcacaaaaaggcagacgggaaatgttcctgcgattacggctttcatatggccatctcagactggaacccccaggtagagcaggagcttcaggatatgatccaggaggggatcaccagctttaagctgtatatgacctatccggctatgctcctggatgatggtgccatctatgaggttattaagaaattaaaggaactgggctgctttgcaggggtacactgtgaaaatgcagatgtgatcgacgccctgatccgggaggcgaaaaaagcaggccgtctggggccggacacccatcccaaggtacgtcccgatgatctggaggcagaggctgtgcaccggcttctggtgatcgccggccaggcccaggcccccgtgatggtggtccatcttaccaaccgaaaggcctatgaggagatcaaagccgcccgggccaagggacagaccgtgtatgcggagacctgcccccagtatctgcttttggatgattccgtttacgaaaagccagggtttgaaggagccaaatatgtatgctccccgcctattcgaaagaaagaggaccaagactgcctgtggaaggccattgccaatggagagattcagacagtggccacggaccagtgcagctttaccatgaagcagaaggaaatgggaaaggatgattttacaaagattcccaacggcatgccaggagtggagacaagaggaacccttatttacacctatggagttaaggagggaaagatcactctggagcagatgtgccaggtgttaagtgagaatgcggcaaagctttatggcctgtaccccagaaaaggggcggtccaaccgggaagcgacgcagatgtggtagttctggacccacacagggattgcgtgatctctgcaaaaacccagatgtataacatggactattctcccttcgaaggctttgcccttcatggaaccatagacaaggtctttttaggcggaaccctggtggttgaccagggaaagctggtgaaagaaaaacagggaagctatgtataccgggagaaaaacaagtttcacaattaagcctctctcccaggcagtaggatgaaaaagagtctgatcacatgggaacatgggcaaaaaattacggccgcagatctattctgcggccgcaaattccttctttaacccgtgggctttgctttgggccaatgtccataaggcataacccttggaaagcctgatggatatggaagattaaaggtcaatattaatgttctgctgggcaatgccgtgtttcttagcatagccggtgagaatcagggtcagggcaccgtcgccggttacgttgcaggcagtaccgaagctgtcctgaagagcgaagatggtcagcataagagctgttcctgcatcgtcaaacttcagaactcctgtgatgataccaagagaggccattacggttcctccgggaactccaggtgcgccaatggcgaagataccaaggagtacacagaaaaggatcatggttcccacagagggaacggagccatagagaatcttggagatcgtcatacagaagaatacctctgtcaatacagatccacacagatggatgtttgcaaacagcggaacgccgaagtcaaccatatcctttctaagggttccgggaactgctttgttggcacactgaagagcaacggccagggtggctgcagaggacatggttcccactgcggtcagatatgcggggccgtaatgcttcagaacatcagtacccttgcttccggaataaaccgttgcgataccatacagcagggccagccagatatagtggccgatcagtacaatgacgataacctgtaaaaatacaggaagctgcttggtgatggagccttcataagccagtgcacagaaggtcatgccaatgaaaaacggaagaaccggaatgatcaccttggataccagggacagcacgatcttctggaattcatccagaatggaggtgatgacctttgccttattccaggttgctgccagacccaccataacagagaacacaagggcactcataacaggcatgatctgaggaatggccagctcgaacaccacgtccggaagagatttcagaccttccacatccgtgacgatggagagatggggaatcagtccgtagcctgccagcatggagaacagggcggcgcccaatgatgaaacataggcaatgacaattgcaacacccagcattttggaagcattgtttccaagcttggtgatggaaggagcgataaaaccgatgatgatcagcggtacacagaagttaatgagctggcccagtatgtactttaaggtcacaaccacattgaggatagctccggtaaagctgtttccgtcagtggaattcagaaccaggcccaggacaataccaagtacaacgcccaccagcagtttaaatggcaggctggtaaagaaactgccgcttttagattttgacataataaaatcccccttgaaagcttttattcttatttttaatagtatgccgcagaagcggtccatttgtccggaatcttaagaaatccggcgggtttttaacattccttgtccacatccacacggtcgatcataatattcaggatctccgtgtctgtggagcgcattcccacacgtccgatgtagcccatgctcttgatggtttcctccacatctcctttgatgatcccctctccgggaaggaagctcttgttctgtgtggcaagatagtgggcgatgagcgccgcgtctacggaggatgcgattttggccgcacaggatggctttgctccgtcgcatacaatgccgcccacatttcctaaggtattgatgatggtcagggaaacctgttcgtaggatcccccgtaaaggtaggtgattcccgcaccagcaccgcaggcagcgctgacggcgccgcagtaagcggacagactgccgatgtaatgcttctggtgaatggcgatcaggttgctcaccaccagggcacggtacagcttggtctcggaaacttcccattcctttgcatattcgatgacaggaagagatacggtcattccctgatttccacttccggagttgatcactacgggcatggagcagcctcccatacgggcgtcactgccggcggcagcacgggcgcaggctctggtggtcacactttttccccagacctgcattaaagtcttgccgatctgggcaccataattgttgtccagaccttcctgggagatggcagaattcatctcaatctgacggccgatgacttccttaatgtcttccattttcacagtattggcaaattccaggatgtccctcacggtaagcaaagatttgtcaatacctgcgtcctctgcttctgcctctacaggctgatccagaaggacctcaccatcctttaccatcttggtaatgttggtgtgatggttcacaatggtgacctccgcactgtggtcatctttggaaaccttggccacaatataaagattggccacgccctccacaagggaacaagagcagatattctgctccatgagttcttttgtccgggctatgtgttccggagtgatggactccaggacctcaagtgccttgtcggcgttgccgcctaccgctcccaaaatggcggcgacctcgattccttttaatccgccggaattaggaactgtgacaccttttacatttttgatgatgtttccgctgcagctcatttcaatggtgtcagggaaacatcccaaaagctgtctggcttttgccgctgcgtaagcaatggcgatgggttctgtacagcctaaggctggtacaagttcgtgctttagaatattcagataatttgcatataatgcgttatccattctaaacctcctctctggttatttccaccctatgtggacattatagtataggcgagaaaaaaatacaatcattatttacaaaaatggagaaatttgctatgatgcttttgtgtaaaatacataaatacggcggaggcagacaattgacatatatggacagagttacggggcgttcttacaggccggacaggctatttttgcaggaagctcctggaaaccatggaagaccacacgaaaaaggacggcggaatgaatattttatgaatctgccctgcaaaattttccatacaaggagaaaattgtcggaattgtgtcatgcataaaaattgtgtcacagaaaaccatagaaagaactatataaaagaactaaatataagaactatatgtaagaactatatataagaaatatatactataatataagaagagagcgctttattttataattttataaaggaaagaacggtatatattttaagaaagaactgcaaacaaatgaaaagaagatggcaagtatgaacaatggaaggagtaaaaacatgtaccagataatctatgagcttctgggaaaatacggcaaggtacaaagtgctgtgatcacccagggagaatataaaggaacaaggctggttcaggccggaaatgaaagatttgtacaaagagaggttccggagaaattttgggaaacatacggcccctgtctggagcaggcagatcataccgcttatttggaggaggatggcctttttgtggagtggatggtgaaaaatcctcatcttgtgattctgggcggcggccatgtatcccagcctgtggctcagattggtaaaatgctggggtttcatgtgacggttatggatgacagggaagaatttgtcacaagggagcgttttccctgggcggacaccctgcagtggggggagtttgcagacctttccaaaaaggtgcccgtgtacgaaaacagttattatgttattgtcaccagagggcacgcaggagattccctgtgtctggaacagattctaaaaagacccttcgcctacgtgggaatgatcgggagcaggacaaaggtaaagcttacccggcagcgccttttggacaagggtttttcccaggaagagctgaatcaggtccatgcccccatcggccttcccattggcggccagactcctgaggagatcgcggtgagcattctggcagagctggtccaggagaaaaataagaattacgtggcttaccgggatgaggaggtggagagcgccattctggctcagaaaaagggagtcatgatgaccatcataaaaaaacacggctcttccccaagaggagtgggaagcaaaatgtttgtggatctggatggaaaatcctacggaagcatcggaggcgggaccgtggaatatgaggccctctgccatgcaggccaggtgacagacacagaaatacaggattatgatctttctttggcggacagcaaaaatctgggtatgatttgcggtggaaatgtaaaagttttgtttgaaaccgtgaaataatttgatttttctggaagattatgttatgctgaaaaaaagaaatccggactttaaagggaacacctgagaagaatgggcatcagatcaagaacagagaaagtgatccgccggcagtttcagagcagggttctggaggtaatggggagttgcacagatattgtactttatttggcgtccatttgggcgcctttttttattacatattacatacttgcagctgccaagcccctcatgagtgagggatgtcatgccggattaggaaaggagagtgcagatggagactagaattgcagtggttgccataattgtggaggaccgcacgaaaagtgaagagctgaaccagctcttgtcaaaatatggagagtacgcagtgggccgcatgggcgtgccctatcgggaaaaaggcgtccatgtgatcaccttggttttggacgctccccaggagaagatcagcgccctgtcaggcaagctgggacagatcaagggaatcacaacgaaaaccgtgtattccaaaatgccggaggtctgaggatgaagacactgattcacaagctgtacacagaacatgagctgtcttacggggaatttcatgaacttttgcaaaacaggagcaaggaagaccaggaatatctttttgagctggccaggaaaaccagagaggaaacttatggaaacaaggtgtttctcagaaccctggtggaatttaccaattactgcagaaatgactgctattattgtggaatcagaagaagcaatacaaaggcagtacgttaccgccttacccaggaggaaatcgaaatggccgccctggaaggggtatctaagggctgccacaccgtggtcctccagggaggagaggacccctacttcacagatgaccgtatctgtcagattgtaaaagggctgaaggcccggctgggagatacctgtgccgtcactctttccataggagagcggcccatggacagctacagaaaattccgtaaggcaggtgtggaccggtatcttctccgccacgagactgctgacgaagaacattaccgtattcttcatcccagggaattgtccctggctgccaggaaggaatgtctgtacaatttgaaaaagctgggttttcagacaggagccggctttatggtaggttcaccgggacagacggtccagtccctggtgcaggacctgttgtttctaaaggagctgaaaccagagatggtggggatcgggccatttatttcccacaaagatactccctttgcaaaggagaaaaatggaagcctggaagatacgctgtttcttctaggcgtgatccgcctgttgctgcccaccgtcctgcttccggccacaacggccctgggcaccatcgcacaggatgggatccagagaggactccaggcaggggccaatgtgatcatgcctaatttcaccccctccagggagaggaaaaaatataccttgtatgacaacaagaacagtatccggtgcgatacaggagagacaatggaatggctgaaacgtactattgaaaaagcgggctgccagatggatacacaaagcagaggggattttcaagggaaaaccccataatgtggcccgctttttggaacaagccaaaagaatctcatcaggcggctgggatacagcctgccggatggaaatgtaagaaggaacttccgccaggaagaaaaaagagagggtatgaaaaatgtataatgtaaattcaacaaaagcagaagagtttataaaccaccaggaaatcttggaaacccttgcctatgccaaggaaaacaaaggaaataaagagctgatcgactccctcattgagagagccagagactgtaagggcttaagccacagagaggctgcccttcttctggaatgtgaagaccaggagctcattgaaaaaatgtacaaggtggcaaaggagatcaagcaaagattttatggcaaccggatcgtcatgttcgcacctttgtatttgtccaattattgtattaacggctgtgtctactgtccctaccatgcaaaaaacaagcatatccgcagaaaaaaactcacccaggaggagatccgccaggaggtgatcgcccttcaggatatgggacacaagcgcctggccctggagaccggggaagatcccaagaacaatccaattgaatacgtgctggagagcattaagaccatctacagcattaaacataaaaacggagccatccgcagagtaaatgtgaacatcgccgccaccacagtggagaattataagaagctgaaagaggccggcattggtacctacatcctgtttcaggagacctacaacaaggagagctacgagcagcttcatcccacaggacccaagagcgactatgcctaccacacagaggccatggacagagccatggaggccggcattgacgatgtgggctgcggagtcctctttgggctgaacatgtataaatatgattttgtggggatcctcatgcacgcagagcatctggaggccagatttggctgcggtccccataccatcagcgtacccaggatctgtcctgcagatgatattgataccaatgatttttccaatgccgtgccggatgagattttccagaaaatcgtggctgtgatccgcattgcagttccctacacaggaatgatcatctccaccagagaaagtcctgcctgcagagaaaaggtgctgggcctgggaatctcccagatcagcggcggatccaggacctctgtgggaggttatgtggaggaagagccggaggagaaaaattctgcccagtttgacctgagcgacagaagaaccctggaccaggtggtgaactggcttctggatatggggtacatcccctccttctgtacagcctgttaccgggaaggccggactggggaccgttttatggccctggtcaaagccggcaagatcgcagactgctgccagcccaatgccctgatgacattgaaggaatatctggaggattacgcctcagaggagacgaaggccaagggcctgcaggttattgagcgggagctgaaaaacgtaggcagcgacaagaaacgggagctgtgcgcccgtcgtctggaagaaattgagcagggagccagagatttccggttctgatcacacggatcacataaaagctggcatatttccagtttcacaggggcttattaaaaactccctgtgaaacgaaaatatgccagctttgttatagaagagggtctggaggatccagcttctttgggattctgtttttattggggatataccagacggtcctgggtgatggcgtacagcacctcatctaaatatttcttagctaaatatttggccattcccagattcatatccagatagtttccacagtccttgggggaggcgccggggatctctccctggaaatctcggataaactcaaaggtctggatcaatagaggaacgatgtcctttgattcatagtccccccgaagcagcagataattgcctgtgcggcagcccatggggccccagtagatcattttagggccaaattccttatggttccgcagaaaagtggcagccagatgctccatggcgtgaagctctgccgtgttcatcaccggctcatcgttgggggcagtcatgcggatgtcaaaggtagtgatcacctcatcccccacaggatcctttctggaaacatacacgccaggctgcagttttatatggtcaatggtaaagcttgggattttctccatgtaagtggttactcctttcagtgagaggcttcttatgatcagcggatgcgctccgggaagcctacttttttctgcaccttgcgcagagtctttgtggcatagtagttggccttctcggcgttttccttgatcacggaatcaatgtaggccttgtccttactaagacgggcatattcctcctggagaggctgcagcacactgatgactgcctcgcccacagccagcttaaagtccccgtagccttttccttcaaattccttcaccgtgtcctctggggtattgcctgtgcaggcgctgtaaatattgattaggtttttcagtccgggctgttcgtcacggtagcacatatttgcctcggaatcggtgactgcacgtttgcacttgcgcataatggtgtccgggtcatccatgagataaatacttccgttgatgttttcatcggatttggacatttttttgccagggtcctggagactcatgatcttggcgcccactttgccaatataggcctctggaacagtgaacacatccccgtacaggttgttgaaacgctctgccacattccgggtgagctccagatgctgcatctggtccacgcccacaggtaccacgtctgcctggtaaagaaggatgtctgcagccatgagaaccggataggtgaaaagtcctgcgttaatgttatctgcgtgtttggcagatttatctttaaactgagtcatgcggcttagttcacccatataggtgtagcagtttaaaatccaggccagctctgcgtggccggatacgtgggactgataataaatgcagtttttcttggggtccagtcctgcggctatatataaggtaagaagattgcgggctcttttgcgcagctctgcgggattttggcgcacagttatggaatgcatgtccaccacgctgtagaagcattcatattcgtcacttaaggtcagccagtttttcagggcccccagataattgcccagggtaagatttcctgtggcctgcattccgctgaacaatactttttttccatctatcatggtcggttcctccgtaagcaaaataaaatttcattaaaaatcagtttatcattgtggtaagacaaagtcaaacaaaattcggaacagataggaatacaacaaaattcagaacagatgggaatagacatcttgtttttggtggggtataattacaagatgatagaaactatacagacaaggaaaaggaaaatgtggaaaaaaatctatcagggagggagccatgagattactgatcgtagatgacgaacccctggccctgcaggatttgatgggacaagtgaaaaaagtcgtgccggactgcagcaggataggctttcttacagcaaaggcagctttggaatatgctgccacccatacggtagatgttgcctttctggacattgaactggcaggggagataaacggtattttactggcaaaggagttaaaagatatccagccagaaatacacattattttctgcaccggctatgaaaaatatgcggtggatgctttttccattcatgcaacaggatatctgatgaagcctgtcttttgtgaagatattaaaagggaattgaccttcctctatggagagagctgctatcggccggccaggaaagtatatgtgcatacctttggaggctttgacgtctttgtggatggaaagctgctggtgtttggacggtcaaaatcaaaagagcttctggcctatctggtggatgcaaagggaagaggggtaaccacacgtcaggcctgcgccgtcctctttgaagattccccatacaccagtgcactggcaagcggctaccggaacattgtggcagaattaaaaagaaccctggaagcagcagaggtggcagatattctggttaagaagcgtgattatatcgccatcagaccagaactgctggattgtgacagctacaagtttatggcaggggaagcccgtgaggtgaaccagtatcatggcgattatatgtcctgttacagttgggcagaatattcaaaatgggcgtatgaaaagtaaatatagtcgtgaaaaaagcttgtttttttgaaaacaggctttttttgttgcgtagttgttgcggtcactggtttatactgaaaacaaaacccacttagtaatacaaaaattaggaggaggattaaaatggagaggttaaagaaaaaaacagcggtggtcattaaacgctggctgagcttcattctggctgtgttgatgactgtgacgctcattcctgctgtgcctgctacagtatcggcggaggattttacgtggacgatagcaatggagattaaggtgaaggatataacctttgcaggtacggacagtgatgtacgcctgcggctgtataatcaaaaaagagatcagaaagttaatgtgctgatggatacttcaaagcataatgattttgaaagaaattcaacacgcaaatattcgttccagatttcatcgaacacccttaagccctgggatttaagcttttatgaaatcagattagatggcggtgatgacatggctattgattgggcaaagctgtatataaatgatagattgatagacgatcgatataactatggatggctgtacggttatcatgaagcaggatttgaactttcagaagcgaaaagacagagaaatttggtgtttagctcatcaaacagtgcagtaagtaatgatgaggtaatcattgacgatgatgatacaccggaaaaactaaagttggacattagggcaaaggacaagtattttgctcaggttaatccgtgtagttccacgttcaagcctaataaggtggaatataatttcgggaatgataccgagttaaaaagagcacttgacaagaaagatacttcctatatgagcatagttgattcagctgatggataccggacaatcacatttacgaagaaactatatgattatcttaaaaagagaggttcggattatattctgaagttcgatataacaatgatttttggagatgagaacaaaggggaaaaggtatcaaccctgaaaaacactataaccgtcaaacgtaaagtctttcgtatgacagatagaggcggcggaaatatttttagtattaactctggccaatttgcatatgcagagggtaataatggagcattgttcactaatagtgataagattacgtttgtagggaatatggaaaaattaggaggcgcgggtgttaccgatgcacaaaaagctaaactggctgctaatttttcggctgaaacaatgtcacttaaggttctcgatgataagggaaattggatagagattgcctccaaagataaaatcaagaaatcgtcttctggtggaaacgttaacatagaatgtgagatacctaaagatgtagatactcaccgagctggattgcttctggagatgacaggaatttcatcaagtttaaacgaagtggtctattccatggacggtgtgagtgacgatagcaccaaagacaggaagggagtttattacaaaagatttaccacgcataatattgacaatattgcccctaagctttatgtggagcaaaagaataattcaaatttacctgaatttcagacacctgcggaaatacaggatttctgggtaatgtccagcgaactggtttatccagataccgtcaacgaaaaagatataatgaacagagcatcgttgcgtgagcagatcggctgttccctttataagataaatcaagaccagggaacttctaataaccctaccatgttggggagtgaaaatgatggtgtgtccagaaagcttgttcctgtggtacagatgaaaggaaacaccgatgataagacagacagcagtgtgcagaaactgaggctggcaaattttgaagaaggattctacgaattaaggttctttggaagtgatgcagcttataattccctgcagcttaccaatcggtccacaggagcacttttgaacgataagcttctggttgctttggataatcaggctcccagagtgaatatctcaactaccctgaacgatcgtgagtccgatggttccagaagccttcaagtgacattcagtgattttactgatttctccaaggaagggaaggtatattactgttttgtgccagaaggagaaaaaatgccctctccaggccaggacatggtggaagctccttctgatgttaagaatggccaatggtgttttgttccttttgacggttcaacgacaagccgctctaccatcattaaggttggtccggaacaagaataccagggcacactgtactactatacagaagataaatttggaaatgaaagtcgtgaagaaaagaccgggcctgagggctactattacaccaaagaaatctatttgcccaatttaaaaggaaacggtacagcagagatcattaaacctacggacaaaaaggcagagacgaaatatgtggttactttcaatacagagggagactcctatccctgctattattatgaaaatgcagagggtgtgaagacagatatcatagaaaagcaacccggtggtccggcagcagcctacgaggcaggtgcctctgcagtcacaatagatggccaaaagaaaaacttagatggtcagtggaccttggtctattggtttgtgaacagtggtataaaatctgatgaacagcggtatcccatgagctttgacagcaacgagcccgtggttacggtggagtggaaaagtgagaagattgaaaaggaacacacagtttccctgaaaattacggattcctccaagatcacacaggcaagctacaccttaggtgattctcaggcagttcctcttacgatcagccaggatggaattgtggaaacggacattactctggaaaccccgcagaatatggtaaataatagtgctgtcttcaaggttacggcccaggatgagaatggtcatagctgtacctatacaaaggacctctatttttacgggaagccatctgccgctgtctccagcagctcagaaaaaacctataatgggcttaaggtcttgaaccaggaggatgcattggatattcaggtgaatactggatatgccaagaaatcccctgccgttgccgcaaaattccagtattctctggatggaattatctggaacgaggggcaggaggtacagaccagtttccagggcggtacttatcaggcaaatataagcaggaccggagaagatctgaaactccgccagggaaaaaatacggtatatttcaggacaattgtgggcaaccaaggaagcttagaccaggctacagtgacaagcgaaacagatagcgagtccatgatcgaggtctattatgacaccaaggaaccggaatatagcctttcttatgataagacagatttcacgcaggaggatattacggccacaattcgcataaacgatggattgacaggaacggattcagaaagcctgcgtattgttaccggagatcctctgcccagctttaaactaaggcaagagcagaatgaggcaatctatgatgctgttttcacaacaaacagccaggggactgttacagttaccgatctgtcaggaaaccaagtggagataccggttctggtagactggattgataaggaagctccttctgtttcctcctgtagcgttaatctccaaggaaatggcgatgcagtggcaaatgtgaccgtagaggacatgacggatgtgagctttgccattgttccggcaggcgcttcagataaaccaaatctggagggagcttctcctgtccaggaaccatctcaggacgtcagcggggatgaatatattggtcagcattactttaatgatttgacaaataattatgggatttcccaaaagcttactaagcaaagtgcacgctctgacggagagtatgataacacatatgaattaagtatgaagggtctggaaacaggcagctatgagctttatatggatgccagagacagattcgataaccgtgtggtgagcaagattcagggcagtgacttctctgttgtataccagaagcctgagttatcttccattgtttttgatccggatatagctggggattccggaactctgcctactatgaccgaagcgcagcttacgttcagcagaccggtgtatgttttgacggacaaggatatccagactatggcagaggctgagaaaacggagaaagacaaacaagaggcgcagacaccaccagaggaacagctgtctccagatgaacagccgggagaattttccagtgatcctgttcagacagtaattgtaccgtccattgaatatttgggcgcggtaaatattacggaattcaaaaaccaggccaaaatactttgcacacaggctaaggaatataccgtgtactatgtggatgcggccagaagagagatcttttcaaccgtgatcgatgccactgacaaggtatcacccggaacttatgaaaatcaggtatctttcagcaagaatcaagagacgattgtgccagtgccgggagaatatattggggcagaagatggggattccttccagatgattattgagccgggcaaagaggcttcaggtgaggtcaaatatccggaaggtcagtatttctatataaaatcacctgaagatttgcagggggttaccattaatgaggaattaagcgtcacctgtacacctacgcctatgcccacggcaacacctacaccagagcctacggcaacacccacaccggagccaacagcaacacccacaccggagcctacacctacaacgacaccggaggtgtcgcccgcagaacctcccacagaaaatcctaccccggaggaaattatacagtctcagggaaacaccagcttagaattgttctcttcctctgagtctggatttgtagaggaacaagtgggaatggaaaattcaggaatgctttccactcctgaaattatccagcaggcaggggaagagcattttggacaggaagaaaccaatggagaagttttggatattttttccacggaggtttcagaagaaatagatccaaatggtacagattcaaatgaaatagatgtaaaagaagtggacataaatgaagctgctatagatgaaaacagatcaaatgaaatcattccagacgaaaatacttcagatgtccaggaacctgccacaaacgagaacttttcacaagatatgtttcaggatgcaggcgcagaacttttgatcgaccaagagcctgcccaggaaccggaaccttcccaggaaccagagcttcccaagcgttacacgaaattggtgctggatatacaaaaagattctcagggacaaagaagggccatctatcagtcagtcgtgcttcttccggaagaacaaaatactcctgaagatcccgaaattcctaaagatccagatactacaggggaaggagatttagcacagacaattgagcaagagccgccttctggcggagatatccagtcagtattgaaggaatatgagcagtccaatgtgcagatcgtaccggatattgattggtcagcccctgaatatcaggatgtgaaaattgtatctgagacaaagaccaggggaaatgtggttatacattttcaggtatcagatcaacagagcggcattgagaaagtagaatatacacctcctgcacaggaagggaaggaaagttatccagttaatgttttgaaagaggatggactggttacggatacctttacagaaaatggctccagagtctataccattaccaataaagcaggacttacctcccaggtcactgccaatgtggactgcattgaccgtgaaggcccagtggaaggaagggattatcaggtcgtttattattattacgataagagtggagttccacatattgtggagcctgataaggcctaccggtatgtggaggcccaggtgcaatccataaatggaggagagacatatgagatattgaacaattctcataatgaaaaagtgatcctcagagattccaatccctttacctttgtcctgggtgatcctgcaggaaatcaggagcgggttactgtttcacataattattacgacacccaggcgcccacggtagcggcgcaggttcttaatacagagcccaccagcaaagatgtccagataaaaataacagcagaagattcacaaaatgacattacgcttaaagttactgcgcttagtgacgacaagagtgttcccaaccctgtttggcaggaggacggtacctatctggtcactgtgggaagaaatgggacttacgtggtggaagtggaggacactgtgggaaattacgcagagaccatgttcacagtaaccaatatcaacaaagatgcacctgagatcaaagaaataagcttgtcccccaaggagtttacccagggcagcgtgtcagcaaagctaacttttaagtatagtgctacaaatgataatgagaacaaaaaagtaaagattacaagtgtaacgcctattggaaatacactgaagcaaaccgacatcagcgtttcgggcaacaccattgtttttagaaataatggctcagtgatggttcaatttgaagatgagtttggcaataagaaccaggatgttgtgtctgtgaataacatagtcaacacaccgcctgtcttgaaaccagtcattgagtacaatgagacaaagacggttgccactgtcactttcaagcttctatataataatagggtggatgcaccggaagttccaggtgagggaacagatgaaagcggaaggaagctgtcggatattatgatcagctccggtatattgtactatgacaatacggacagcgaaggaagcgcaagtgaacaatccaaagagtttttcagagctgacaaggcagccttgaaaacaaaacaaaatggcacctatcaggtaagcgcatacgatcaggctggaaatacacaaaagttcatggttacaattgacaagattgacacaggaatgcccacgatccagcaggtggcctgggaatatatcagcaaaaaacagtcaggccaaaatatggataactggacagacacaaccataaaggaaagctacctcgtgtctgagcagggttctgatagtaaggggaaaactggtcttttgctcagtgaatctcaagaaacggatgaagccaagggcatagtccatacagatccaaccaatcaggacgtgaagatcacagtaactgccgacaggcctgtgagggagattggaagcagggatcagggatctcacagcaatgaggtaaccatggattaccagcaggatggaacctataatttcggccttcttgcagccaatggcaacaccgtttcctatgcagtgtcagtgaatttgattgacaaaaatcccccggttctgaagctgaaaaatacggatctggtatttgtggaaggaacacaaagggaggaggatcaatacaacaaagacctccttacagagggaattacctgctatgatctggataactttgggaaacccgttgaaccaatgacagaagaagagatcgcccagaagcttgtgattgattatggcgatttcgacccagataacattgaaaataatacatttgacaggagtcggccatatacaatcacctataaaatctacgatgacgtgggaaatcagacggaggttatgcaaaacatctgtctggtaggaaaaaatgataccattgcactggtgaatgggaagctgccttccatgagcgggaatgtttttgtggatgaaccatatttggcggttaccatgaaaaatcatgggggaagaacctatgtgaagtgtgcagagggcagcaggagcatggctgaaatgaagacagagggaatcccggtgccaaaggatgaagaaagcgggtcttacaagatgaaagatgtaaaaagaggacaatggtatacgcttctggtacagacggataagagagactatattacgatccatgcgtatgtcaacaatgagaaggaagagggggatggcaaatgagagcctggaaaaaatggttagcatccatattatgtgcggttatgattttgtcggtcctcctgggaccggcgccctgggaggcctatgtaatggccgcctcccaggaaacggttataaataatgattacctgaaatattcactgaaccgctcaaccgggggctttctcataagcaccctggaggggcatccccagaaaaagctggataataatatccccctgctctatgcagagaccaatgaaggaatggagacttccttcattacagtgaggatcagtgatgattccaaggcaggatataccgactatatctggggccaggattatagctggctcttaggggagggacaagggaagctggaggtctctgatcctgtgaaagagggaaaatccataagtattcaggctacctggtccatcctgggtgtggatattattcaagatgtagtactgtcaagggaaaaggacagagaggagaataccaaaggaaatgtgggaatctcctttaaagtaaaaaacaatggggacagcaccaggaaggtttctatccgtatgctgctggatacagccctttccaatgccattgatgccccttacattatgacagggacagaacacaataagtttgagagagtttatgagggagaaaggataccctctgaattccggggtgtagattctcttgagaatccctccagaatgtgttatgccattttaaatggctgggtgggaaaagaagttgatcgtgtagcagttggacattgggcgaacctggctaattcaaaatatgattttaaccctgatagaggcatggatttcaccaccaatgccaacaagaatttaacagcggataatgcaatggctttttattgggaaaatctagaggtaggagccagccaaatatctgagccatgtcagatgctttatggagtggggaatttcacttccgctctgtctgacaaaaatgtaaatatcaatatgacagtgggacgtgtgtccttaaatgatgaaaaaaacggttatgagaacgagggcattttcgaagtggaggcttccattgataatacagtggataatgcaaagaccattaaaaacggagtcttcaccttgggacttggcaaggagcttgaacttgtaactgaagaagcagagggatatgagacaacgctcagccctgtacttccagaagaaatttcaaaaggcagtactacccctacctataagtggcgcgtcaaggctaaggagcaggcggagattacagccgaggaaataacggccagtcttaacagtgtagatcccagcaataagatcaatgagatggctgtgagatatgtgattctgcccaatgccaagggaaaggttgctgaggtgaaattcagcggtatcactcctccaagaatctattatgaaggttcccgttccctaacggtaacaggggaattcggtccgctcaaaggattaagtgcctctggatgggatcttcagctggttcccatcaacagcaaagtgaatgcttccgatgttatcagtattgataagaaaaatatcagctttgatacagagaataacaacaatttcacttttctggttgataaaacaatgagcttaggtgtgtatgagctgaacttcgtttttcaggatcccgcactgattcaaagtttcggagccaatgtacttaatactggaatgcgtgtggaagtagctgatgatccagcgctgaaggatccaaactatggattgatcgctcttatccgctacaatgaaagtgaatatatattcgttcccttcgagaacgaggctgtctattggaagttccagcatgggcagataggggcaacggctgtgggagccctaggagataaagttaccttagaggcaaacaattatcttgagggtgaagacaatacgaaggaaattctggtggctgcccggggtaaggtcactgtgggagagacagagctgaccggcggcaaaaagattccgaattatatattgagcaagtccgcacagaatagtaatgtaaccttgaataactgtatttcctgtgaaaataatgtgatattgtcctataatacagaagacggtaaccattataacgtggacatatccggagacggggagctgcgtgtcattaactccatttccttttggaagagtaaatggaacatgggcattcaaagagggattccggtaaccatttcagatgacaatccggatctaaatgaattggaaattcaactgggtggcgttggcacaatgcttcaatccatcggcggtatgcttattgacatgaagtatggcgtacttaccggcgaggtggtggatacaggtgataaggcctatctggcctgtggagtgagctttggcggaagtctgagtattcctatgtctgtgaccaagtccaaaaagtccgaggatgaagagggcagcgaaggggacgatgacccggatgctcctcctaaggaaccctccggagacgacgatgacgatgatgacgacgatgacgatgatttgctgaaggtagagattgagcaggtcctttttggagagaagcagctgaaatcaaaagtaaacccctatatgctgggagccggagcacaaacagatgcaggctatattggaacctcagcagaagcctatgtgggacttcccgaggatattctgggaaaacttatttcaaatgccggcggcgcctatgcaagtgtgaagatcaataccatagaagggatctacaccctcagcgcaggcttgaagctggccatgttggaatgtgagggtgtcatcagctttaagaccgtgaatattaacggcggtgacaaaacccttcctgatacgttgatgtttcagattacggatggaatgttagtccccatcgtacctcccactgtgtttatgacaggaatcggaggcggaatctcggatttggcagataccattgccggagataccatctcggagcttcctcccctgacggtgagcgtttacatgaagttgaagatactgcagaccttctcaggtaaatttaatgcttcggtcaatgccagtggactggatctcatcggaaaaattgaaatggaggaggtaaaagatcttttaaccattgatggcggcatttccgcaagatggatcgatccgttctatttccgggcttatggccagatcaatgtgttgaacattatcaagggcggagcgagcattatcattgcagaggattatttccatggctatgcgtttgcggcagtgatgcttccagatgaaattccacttattggcggcaaggaggttgccagagtggaagtgggagtgagcgacaaattcatcggcggcaatataaaaattattggtctccaatttggtattatttattattatgatgccgatagtgtgaaatttggctccgacatagatgtaggaagcatggcaggaattgaagacgagtccccttatggtctggagcaaaatggcgaggagctctatggacaggaagaagtgggcggaatggaagctctggcagtggaagaggggtcatccattacacaggagggcgaggaagtatcctataccatggtcttcggtcctaacgtaaagagactgaccaataataaggtagagccagtgagggtaagaaatggcctgctgaaagcagctcctggcggcaataataagacagtagtggaatttgacccaagcaaggaggacgcactgcttatggaagtgcctcttaccggggatggtatagttacccagaaacagatacatctgcatgacccagaaagtaaagagatttctctgatcatggcaaacgaggatgatggttatcaaagcggaaacctgctgatccaggatagagaagacggcagcaggtatctgtatatcagtattacaaatcgagaacaactgaaagcagggcgctggacgctttccatggataactcagcggtaagcattatgaatgcagatgtatatacctatggagtggacagtcttccagagctggaatctaccaagatttctgctgcagtccaggaagaggcaaaagaaggacagcaggaagaggcacagaaagaacctgccgtggatgcggcaaaagacaaagtgaagctttcctggaaggtaaagaattccaatgagaaatctgtatttttaggaaagatcagttgttatctcagccaggataaagacattttgaagaaactgcaaaagtcccagaaaacagccggaaatccagaaaatgagcagattgagttgggaaccatgatttacagcgaggattccgtgaaaattgtcaatggtgaagcaaatgcacaggtatccctgccggaagctctgcctgccggagactattatctggtgacaactatggacttagaggcaggagccgcaggagcaaaagtctctgagaatcccattaagatcacaaattctaacctgcccggatctgtacaaagtgtcagcttaacaccagctggaaatcttcagcttctggcagcgatacaggatgatcccaagggggattacacggagtatttcgcagagcttgtggatgaaaagggtgaagtggtaaccagcggtttctatgccaagggagagcagatactttttggaaaagcccttaaacttgaaaaagttggtgatgaacagataataagagaaatacaggccggtgataagtatcaggtccggatccggactgtgcgctccagtgtggaagaggtggaaggaacggttgttgaaaagaagctgatgtcggattctgtctttgagacagagtttgttgcagtacctgcatttgatcctccaaagcttctctctgtcaaaacggaaggaatcggaaacgccagatcttcagatacggcaatatatacttcacagaatcatataaaagtggactatacctttgacagggaactgagcaaattccgggcatacctggacggaggagccttcgaggcaacgactgttgacatgaagacctggacagtggaaactgacgtggcagatggatcccataccattgactttgaagcatatgcaggacaatatggagatgttctgcaggcacaggagggaaatggacttattggatttatctccgatacggagccgcctatgctggtggtggacagtgagtccagagaaaatgtagaggctgcccccgctgccagacaggcaggactttttgaagaaggcctggagcagatggcagaagttagtgaaacccagaaaacaaccgaggtatcctcccagacggtttataccgacagcaggaaccaatatacggttaagggacataccgagcctggcgtggaactgagcttcacggaagatgcagctatcgagcttgaagatgatggaatctttacaataacaggcaccttgaatttgggtggggagatcagccgtacagcggttctgtctgcaaaggataaagcaggcaatactgccaatataaatatttatattatgaacggcaatctgaaataccctgaggttctggagattgttaacaatggatcgctcataaccccagatgaaaatggagacaaggtaatcaccatgaaggtgggagaacggctgaatctcagtgcggttgggtatgaagaggaagtttccttaccagaagagaagcgtccggtgagctttgataccagcctgcttcaatgggaggcactctatgaaggaaataaattacaaattgacggcggtaccatcaccgcactgtccacaggagaggccggagttaaagtaaggcttccctacgtaactatacaaagtgaaggaaaagagctggctgcgggaccacaagattatgtacgcttgatcattgaagacggttccacctataccctttcttatttctcaggaggaggaacagggaatacacctggcagtcagagacttgcaagcggtcaggtggtggttcttcccgaaaatccgtttacaaagggagatatggcatttgagggatggacagacggagagaagctctaccagcctggcacaccatatgttatgccaaatgccaatgtgcgtctcactgccaagtggaagggagaagaaatcgtaacaccgtcgccgtcgccctggtatccggatttcaccccgaccccggaacctacccctaccccagagcctactcctacaccaggcgtaccgccggaggataaggtagaaattgctgaggacggatccatcacggttcctggaactgacagagataatcctgaggatgatgtgaaaattctgccatcccaggatggaaccaagccggaatacgatcctgctgccaggaaggtcctgttgccgggaggcggatttatccttagaccagacggaaagggaggaactataaccaacaaggtttcagccggaacaacggtggatatagacggaactattaccctgccccagggaactgtgataaaacctgacggcggcatggttctccaggacggtacaattcttcccacaggatctgacggaagcaggccatccctggatgataacggaaccattacagatatccatggagtaaagattgaggaggacggaaccattatcctgccgggaaccaacagggacgatccctcggatgatattatcatccgcccgtcagcggagggttcacgaccagtatacaatcctgaaacaggaaaagttaccttaaccccaggagtaaaagttacggctggggatggaaacggaggaactacggaatttgtggcaggagatgacgtggatatttccaatgacggaatcctgcagtatcctgacggaagtaaaacggacctggaaggaaatgttgtgagcctggctgttcccctgtttgaaggtgaggtaagccagaaaatccccaataagatccaggtaactgctcttaagggcggactgaactatctatatgaatatgtgctgtgtaaatcccaggaagattttgaaaagggaaattatttccggagaatcacaggaggcagccaggaggatgaattccagatcctaagaaagggaacctattatatgtatgggcgctcttatgtgatggacaaagatggaagaaggacatattccgactggtcagggcctacagtcattcaggtgggaagtgatacaccaaacgcagccactcttgtaaagacgtccgtgaaaggccgcaacgtgtccattacctataagacaggcgccagaacccagttcattgatgtattccttggcagacagcgccgagtgatcgatgaacaattcaggccggtgaatcttggaaattataagctaatggggcagaagcccggaaccaggaccgtcacatttaaaaatgtgaagcccggaacctactatgtaggcctccatccctatatgctttattccaaatcccagaaatccttcggacggtggaacaagcaagacaatggtaccaaggtggtagtaaaataggaagacattagaccgccgaaaattcttcttaagaaattgacaaattcttctggtggttatataattgttttcataaattcaatagacaaaaggcaaagaaaagaagagtacatttcccagaatggcaaagagaacttcggctggtgagaagaagtgcaggaagagaaatggaagatggtcttggagccgcgtaccgactgcttgaggcataggctacgatgggggtgcccattacagcaccagagtatacagatctttctattttgatcaaaggtcttgtacttgctaaggtttccgttgagaaatggaaataaaacaaggtggtaccacgaagcataatgctctcgtccttaattgtatgatacaattttggacgggagctttttgtcgaatagtaaagttttctgttgtacctttattttttgccggaagaggaggagattatgagtaaacagccacaaccaaaacaagaaggccccaaatggtcagggagcttcggatttatcatggcggccgcagggtccgccgtgggaatgggaaacctttggcgcttccccatgctggtaggggaaagcggaggcggagcctttgtgttcatctatctgctgtgcctgctgctggtgggaattcccctgatcattgctgagatcagcattggacgcgcagggggcaaggatgccttcggaagctacaaggcattgaattccaagtggggcggcgttggtatcctggccgtgatcacgagctttatcggtctgtcctactatgctgttttaggaggctgggtgatccgctatatctttgcgtccgccagcgggatcacccagagtacggaggagttttttacagcctttacaggaaatacctccagccagatcattttctatattattttcatggtcatcaccgttctcattgttgttatgggggttcagaaggggattgaacgttcctgtaagattatgatgccccttttgatcgtgtgtcttctggtgatcgtggtgcgctcctgtaccctgccgggagcaggagaggggatccgctttttcctgaaaccggacttttccaagctgactccagggctgtgctggccgccttgggacaggtatttttctctttatccctgggaacaggagctaccattacctacggctcttacctgggcaaggaccagaacattcccaaaagcgcacttagcattgctctttttgacaccattgtggcaatgatcgccggctttgccattctgcctgcagtgtttgccttcggattttcaccggagagcgggccaagcctgatgttccagacacttcccgctgtcttccaggagatggccggtggcaggatctttggaattgtattttttattcttgtgttatttgcagcgatttccaccagcattgcatttctggaggtagtggttgcctttgtggtaaacacctggcatgtggcccgtgggaaggcaacggtgatctgtgcggcccttattacctgtctgggtattccctgtgcactgagctttggtatttggagtgatattaaaatcgcaggaaaaaccttctttgacctgggagattatttggtttccaatgtatcccttcccatcggaggaattctggcctgtgttttcattggctgggtgtggaaaaccaaaaatgcggaaaaggagattaccaataacggtgagatttcctttggcctggttaaagggtggtctgtgcttgtgaagtatattcttccggttgttatagccattatttttgtcacttctttgtaaagttttatagtttttattcttatagatattggggatccacattgatttattatgttgatttaaagtacctaatccactataattattctgtaaaggtgccaagaaggtgaaaaatattgcataataaaattggacgagattagaaaaaaggttcatcccgcgtgccagtatagtatatagaagagaagggaggccagaaatatgtattgctggaagaatgacaacaagaaagaaaaaaagaataagggttggcgcaggaggatttctattttactctgcgcagcacttctgggaggtgtgcagaccgggtgtggggaaaataaggaagataaaaaaaataaggaagagaaaacggtggtgacgatcctgcacgccaatgtttttgaacatttggagaaactggtagaggataaatatccagatattgaccttaagagtgaacaacttccctatcccagtgagcagatgcgtaggatagaaaaaggagtgggaccggatttgattgtacttccccagccttccagtgatacggcggagaactatctattggacatcagtgatattgaagccagcactgcctatgacggtaccgtgatgaagcagctgcaggtgaacggcatgacgtattttctccctttgccggggcagtacagcggttatattgtcaacgaaaccttgtttgaggagactggtatccccctgccgtccagtaacagggaactattggatgccttagtgaaaatgaaggaacaggggatcggtgtgggcgaggatggagttaattttgccatcaacagtgaattcaacgcggatcttggtatatactatgtgggatatatggtgccggacttcctgggaaccgtggaaggtgacgcctggcttgcaggttttagaaataaagaggaaacatttgtgggaacatgggattatatgtttgactttacgaatcagatggttgatgccggaatactggatgctgcagccatgggaggaaaacgcaattcaatccttagcaggaaacgcatggcagacggaacacttgctgtagtactgggaaactcttctctgtatcagcaatgtgttgcgcagaacaaagccaatgtggaggcgcagaagtctccggcgtattcttaccggatgatgcctttgcttagcgatgagggcaacgagccctggctgcttctggcaccgtccgcctatatttctgtcaataaggcagcggacgaaaaaaaacaggaagctgccaaacggatactcagcctgctttccacgccggagggccaggaggcggttatggaggatctgaagatgggtgtgtcttacttgcgggattataagtctgagaccgcatttgttccggaaggcctggaggaatatatagagtccggctatgtgtacaatgtacaatttcccaacagaatcacggaatatctgggcagtcaggcgcggcaggtgctggcaggcaaaataactttgcaggaggccctggaggcagttgaccgctatcattatgagggagcaaaaaacgtagactacgatttgtccgtggtaggaattctggaacatgacctgctgttccaggactataatgtgcgtctgaccgaaacggaaatcgggaatcttctggctgatagtatagctgaggcatcagacgcacccattgcggttgccaacagcggcgggatcagggcaagtttatataaaggcgagatatacggagaagaactgtcagaggtatgtccttttgacaatactattgttgtattggaaatgagcggtcagaccttatgggatatgttggaaaacagtctctccgcaatcgtaaaggatgatattccgggcggacgtttcctgcaggtttccggaatccactatgttttcgatagcagcaaacctgtgggagagcggctggccgaggtgaaattcccggatggtacacagttggataaagacggactctaccaggttgcagtcaataactatatggcgggaagtcaggggtatgcagaaggaaacggcgacgggtacgagatgcttaactgctatgacgaacacactcctaaggcagatgtgcgtgttgtcctggaaacgaagctgacttaccgggatgcactggtccaatatttcgagaaacgtaaggaggagtccataagcaaagagctggaaggccgtatcgttgatctggccggacaaacgcagtgatgggagggcttttgatacggatgaaaaagagtaaacgcagtgtcgtactttttctggtggttttgtgttttgcgttagctctgatatttggcggtgctgcagttaaaaagtcatatgacaaggaatccgcacagacagtctccagaatcagccaggtttatctgcaggagatgacagcacaaattagcagccattttttgacaaatatggacggtcagtttgcacagcttcagacgattaccgagtatttatatgagacggagctgaataatgaagaagagttaaatctttttttaaagaagatacaaagtgaaaacggatttacccagatggcgttgatcaacagcgacggaaaagcatattcttccacaggggctttttccgctatttcaaaaattacagacctaagccttctcctttcgggagaggagcggctgatttcttttaacgaaagcatatgggatacggacatgctgctgcttggtatgcccattgagacaaaagcctttggtgatgaggaattggtggcggtgatcgtagggattgatacggcggtcattgaccagaagctggctcttggcagggaaggcacggattcctattcaagcattatctccccaaacggcagctttgtgattgccagtacctattcagctgcggccagatacggagccaatttcttttctacactgagcagtcaggctgttttcgatgatggatataccctggagatgatgaaggaggcgctgggacagggagaatccgggatggtttctctgcagattggagacaggcatgagtatgtttattatgcgcctattcatgatacagagtggtatctgtgtacgagcatgtcttatgataccgtcaactcccaggtgtcaagtctgagtcggtttatgttgactatggcagtggtggtttttatctttgtgctgttgattatcctggtatttttccttctgcacaggaaaaacgaaaaaaggagcaggcagcttcttatggcggaaaaggagcgggcagagttggcaagccgtgcgaaaggcgattttctctcacagatgtcccacgagatccgtacgccgcttaacggcattctgggcatgattgccctggggcgaagccatggggacgatctcgacaggatgcacaactgcatggataaaattgatctgtccgcacagcatctgcttgcgctggtcaatgacgtactggatatgtcaaaaatagaaagtggaaaaattgagctgcatgaggagaattttgattttaacaggctgatgaagtctctggtgactgttttctatgatcaggccagacaaaaaagaatcaggttcgatatatatatcaccgacgaactggaagaggagctggtgggggattcgctgaggcttaatcagattcttaccaatctgctttctaacgcgatgaaatttacccccagcggcggcagtgttgtattgaaagtgcagatgctgaggcaagaaggccggaaacagtggcttgaattctccgttcaggataacggctgcggaattgcacaggagaatataggacgtattttccagccctttgagcaggaaaatgcaggcataacccgtaaatatggcggcacgggccttggtctgcctattaccaagcggtttgtggagatgatgggcggcagtatttctgtgaaaagccatgagggggaaggcagcagcttcacggtagagcttcccttcgggtatgtggatcaggctttggaagctaccggttctggagcaggacagtatgccctggtagtaaatcaaaaaaacgacagcagggcgtgtctggcagggcttttgaagcggcagggctttgctgttaaaaatgccggttcctgtgacgaggcgattgccgcggcagaggatatcgttcagaatggggagtttgcactttgcatcatccgatgggatttatcagcagagcttgtaagacttgtggagcgcatccgcagggtttctttggataacttacctaaatttgtcatcagcggctatgatcgggatgaactggatgaggtggccggaatgacaaaggctgacgggatacttgtctgtccgccgtttcgttcagatatcatccgccttttacaggaactgcattcggttatacctgcggaaaaagcaaaaggtcagtccttcagttttcagggattacggatactgattgcggaggacaatgaaatcaacagggagattgcggttggacttcttgaaaatatgggggcgcagacccaggtggcatttaacggacgggaggctgtagaacagtttcaggcttccccggagggcttttttgacctgatcttgatggatattcagatgccggaaatggacggctatagtgctacgcaggcaatccgcacccttcccagggaggatgcagggaccgtcaggatttttgccatgacggccaacgcccttgatgaggacaggaagaaatgcctggaaagcgggatggatgcacatattggcaagccgtttactgtggaagatatagttcgggagtatggccggatagagagcggtttgcagagatgaacgaaggttagaacagtaacttaaattgtgaattcttggtcacatttggaagttgttcttgagaaaagaggagggatgttttataataagtagtcagtgaaagaaaatggaggtacgaggtaattatgatgaagaaaatcgtttctgtgctctgcgtggctgtcttgtcagcagcatttctgtctggctgcggcgcagataaagcagaggaaaaaaatacggatactaagcaggagaccacaaaaggaacggacagctccaaggctgaggaggtaaaggataccgacgcagaggacctgttcggggacgacacggattctcttagcgaagaagatatggccagcctgccgggaaatgagcttctgtccggcaagcatcatgcagagattgtcatcaaggattacggaaccatagaggtagagctggatgcagatacggcacccattactgtgacaaattttgtgaacctggcaaaatccggattctatgatgggcttaccttccacaggatcatggaaggctttatgatgcagggaggggaccccaagggcgacggaaccgggggtgcagacgagaccatcaagggagagtttgagaagaatggtgtgaagaatgagatctctcacaagcggggtgtgatctccatggcccgttcttctgattatgacagtgccagctctcagttctttatcatgcatgcagatgctgcaagcctggacggtgaatatgcagcctttggccaggtgacagaggggctggacgtggtggatgccatctgtgagaaggcgaatcctgtagataacaacggaacgattccctcagaggaacagccagtaattgaaaccattcaggtgattgactaaaagatgaactgcctcaggcaagaataccgatgaaaaatcggtttctggcttgaggcagttttcttttggttgtgaacaccgggcagcagaggtataatagagcagacagatttacagagaaaagcgaacttgaggaacaggaggcacaggggatgagtgaaaaagtcctgatcgtggatgatgaaccggagattgcagatctggttgccctatatttggaaaatgagaattttacagtagagaaattttacaacggccaggaggcctgggaatttttgaagggggaaaaggtggacctggctattctggatgtgatgcttccgggaatgagcggccttgccatctgtaagaaaatcagagaaaagtacagttatccagttattatgctcacagccaagggggaggagattgacaaaatcaccgggctggctctgggagcagatgattatatgacaaagccctttcttcccctggagctggtggcccgggtcaaggctcagctgcgcagatacaagcgatacaatgtgatggctcagccccaagaggaggttatggtccattccgggctggtgctcaatgtggggacccaccagtgtctgctcaacgaaaaacccctggagctcacccccacagagttttccatcctgcacattcttctcagggaaaagggaaaggtggtcagtgcggaaacgctgtttcacgaaatctggggagacgagtatttcagcaaaagcaacaacaccattactgtccatatccgccatctcagggaaaagatgggggattcctttgaaaaaccaaagtatataaagactgtctgggggtgtggctataaaattgaaggataaacttttaaaagtagtgtgggtgctgctgatcctggcaggaggggcaggcctgtgctatgggatgtattacctggtggattatatctggaacggcacctttgtggactggttcagcgataattatatgcacacctacaatgaacaatgggatggactcacagaaagggtggtcacggaacccagatggcccaagctgaaggtactgctgttcactgtattgatcgtgaccgtggttctggggctgtgtattgtcctggccgctgcctatttcaacggaaaacaggaagcgaaaaaggccgtgacaaaggccagtgccatgatccgcaggtatatgcagggaaatcaggaggccagtgagattttcccaaaggaatatgcggaaatttccgcagagatggcagagatcaaagccctgatggaaaggcatgagcaggtgctcaaggaagaggctatgcggaaaaatgacctgatcacctacctggcccatgacctgaagacccctctcacctccgtgatcgggtatctcagtcttctggaggaggcgccggacatgccagagaagcaaaaggagaaatatataaagatcacattggataaggcctgccgcctggagtccctgaccaatgaattttttgaaataacccggtataatctgcagcagatggagctggagaaggagaggctggatctttattatatgctggtccagatgaccgatgaattttaccccatccttcatgaacatggaaatacggtgaatttaaaggcagatgagagtctgacggtatatgcggaccctgacaagctggcccgggtattccacaatattttaaaaaatgccgtggcctacagctacagggacacccctattgaaatctgcgccgtcagtgaaaaccaggaagtttgtatttcttttcggaatcagggaaagactatacccagacagaagctggaccggatatttgaaaagtttttccgtgtggatgatacccgaagatcagacacaggaggggcaggcctggggcttgccattgccagggagatcgtcactgcccacaagggcaccatcactgcggccagtgaaaatgaggtcaccaccttccaggtgaccctgccccaggagtgattaagaaaagttcaaggaaatcttaatcttttcttaggaatgaaacaattggatattaaagtgcagatcgcttctgttcggtaaaataaagactgaacagaagctattttattacatgggaaagttcggagaactttcccatgtaataaaaaccctccgggggatgcacacaatgtgccaaggaaagctgctttgcagctgcacattggcgcacaaagctgtcaagcccctcatgagtaatgggatggggagttgaagcgggcttgcctgctttgttacatgggaaagatctccgaacttccctagatgcttctttcatcattaaggaaaggcaggtatccgtgtatggaaagaaataaaggaaggaatcagttagtagtgagaaagacctttcaaagaaggagaagaagaaaacggcttatgggaattggggcagccctggtcctgctggttttactgggcttgggagcagtaaaagccctgtcctcctatggagaagatacggccccctttttttccttagtaagaaatgtgacaggagaaattctggaaagttccccacagtcccagccggagagcagcgggccaggggccggaactgtggatctgtcatccctctacagtccatatgccatcttaacggaagcggacaccgggcaggttctgggagagcgcagcagcagccagaggatttatccggcatctcttaccaagatcatgactgccattctcctggttgaggaagccggtgatctccagcagacggttaccatggagcaaaggatttatgacgctctttatatccaggaggcctccatggcgggctttctgccgcaagaccaggtaaccatggaagatctgctgtacgggatccttctgccctcaggaggagaatgctgtataatggcagcggatttccttgcaggctccgaggaggccttcgtggagcttatgaatgaaaaggcccaggccctgggaatgacagatacccatttctgcaataccacgggtcttcaccaggaagaccattactccacggttagggatctctgtgtgctgttaagctatgcactgcagaattctgcgttccgggaagcctttacatccagctggtacagttatctgcccaacagccagcacccggacggtttttcttttagcagcaccatgtttaaatatatagacgatcctcaggttgccgggggcagcattctgggaggaaagaccggatatacccaggaagcgggactttgtcttgccagtctggcccagattaacggaaaagagtatattctagtgacagcaggtgcccagggcagccatgagactgagcagtatcatattacagatgcgtttaccgtatataacatgctggggcagacaggctgatgaccagagcatgctggatgaatggaattttcgcttcataagctatgctggggcaggctgacaaccagagcatactgacaaccagagcatactggatgaatggaatttttgcttcataagccatgcgggggcggcacctggcagactacagcttgatgacaagtacagggatggggggattgttggggcggttatagtaggtggataggatcaccaggaatttccgggggtccaggtttttcacaagggaaagaaccgcatcccgctcctcaaatccagtatctcctccgctgtaaatacataaagacagcagaccgccctttttcaatagagacagggcggttttcagcgcctgggtactggtgtccgcccgggtggccatctcatggcttcctcctggcagataaccgaaattaaagacaatacagcttacgctgtccttttgggcataagcgtccattttcgtatgggattccagaaaaagctgataattttcaggagcctggttttctcttaaaagccgccttgtattttccagtgccttttcctggatatcaaaggagagcacctggccggaaggtccgcacagccgggacagaagcaaggtgtcatggccgtttcccatggtggcgtccacgcacaggtcccctgggtgtacctgcttttcaataaattggctgcaccattgtgtgatctgataattttccataataaatatctcctggttctatgtgatgaaatgcgatcgtttataaggataagccagttccatgaaaacagtgtaacatgccacgcttatcatggataatataccctgggtgtgtataaaaagcaatacactgctggaaatcagttgcaatttatctgtgaatggatttataatacacctagaaaccaggaaggagtactgtgatgttaaaaggcaaaactgtattattaggtgtaaccggcagtatcgctgcttataagaccgcttatctggccagcgcattaaagaagcttcaggcggacgtacatgtgctgatgacgaaaaatgccaccaatttcatcactcctattaccttcgaatccctcacaggaaataaatgcctggtggatacctttgaccggaattttcagtttcaggtggagcatgtatccattgcaaagaaggcagatgcggtgatgatcgctccagcctctgcaaatgtgatcggcaagctggcccacggactggcggacgatatgctcacaaccacagtcctggcctgtaaatgtaagaaattcatttcccctgccatgaacaccaacatgtatgagaatccggtggtgcaggataatctaaagattctggaaaagtacgactgggaggtgattcagcctgccacaggctatctggcatgcggagatacaggagcgggaaaaatgcctgaaccccaggtgcttttgaagtatctggaaagagagcttgcctgtcccaaagatttggcggggaagaaggtcctggtaaccgcaggccccacccaggagcctctggatccggtgcgttatctcaccaaccattcttccgggaaaatgggatatgccattgcaaagaatgccatggagcgaggcgctcaggtgaccttggtatccggtcagaccgctttggaaaaacccatgtttgtagataccatctccataaccacagccaaagaaatgttcgatgcggtgaccgctcaggcgcccaatcaggacatgatcatcaaggctgcggcagtggcggattaccgtcctgcggatgtgagtacagagaaggtgaagaaatctcaggatgccctctccatacccctggagcgcacggacgatattttaaaatacctgggagaacacaaaaagccaggtcagtttttatgtgggttttccatggaaactcaaaatatgctcagtaattccagggccaagctggttaagaaaaatctggatatgatcgtcgccaacaacctgaaggtagagggcgcgggctttcagacagataccaacgtggttaccctgattacagaggatgaggaagtttcactgcctttgctcacaaaggaggagacagccgcacgcattctggataaaatcattgcccttatgggcgcacctgtcactttataaaccaaggagagcggagaagctccgctgtttccaccaccgtattgtatcccaggcgggaatgataacaaggaggaaaaaattatgagcaacacagcagtagcagctaacaggacagttgtgtccaaaaccaagggcatggcacagacagcgcttttcgccgcattgatcgtgctgatggcctttacgccatttctggggtatattcctctgggatttacccgtgcaaccattatccacattccggtgatcatcggatcacttctgttaggccctaagaagggcgccatgctgggcggcgttttcggactcaccagctttatcaacaataccatgaatccaacggtgacatcttttgtatttaccccattctacacactgggagagttcagcgggggcatcggcagccttatcatctgctttgttccaagaatcctggtaggtgtggttcctttttatgtgtataagctggtgaaaaaatacagcaagcaggaagtgtctgcagtgggccttggccttgcgggagtagccggagctctgaccaataccttgctggtaatgaactttatttttttgtttttccgtgaaggatatgcggctgccaacggcgtggcagtaaatgcggtatatggatttattttatccatcattggcatgaacggtgtgccggaagccattgtggccggtgtcattgtcatcatggtgggcaaggtacttatgaagaaaaatgtgagaagcaaattaggagtataacgatgatattagccattgatattggaaatacaaacattgtggtgggcggtattgatcaggagaagacctttttcattgagcggatctccaccgtgcgcactaagacagagctggaatatgccatagatataaaaaatgtgctggatatttatgagatttccccggataacattgaaggaggcattgtctcctccgtggtgcctcagatcacggatgtgatgaaggaggccgctgagaagatcctgaagaaggagattcttgtggtgggtccgggactgaagaccggactaaatattttaatggactttccgggacaattgggcagcgaccttgtggcagattctgtggcgggtatttcccattatcaggtgcctctgattatttttgacctgggcacagccaccacggtgtgcgtggtggatggcaagaagaattatatcggcggtatgatctatccgggacttcgggtatctctggatgccctcacctcccatgctgcccagcttcagggcgtgagcctggatctgccccggcgggccattggcaaaaacaccattgagtgtatgaagagcggaatcctctacagcggcgccggtgccattgacggcattattgaccgcattgaggaggagctgggagagaaggccacggtgctggccaccgggggcctggccaagaaggtggtccctctgtgcaagaaggagattatcctggatgaggatttattgctgaaagggcttctggtgatttatcagaaaaatatgaggaaatagataatagacggaaattaagaattggtttgtgatcaaaacgcctctgtggcagatagtcttagaacaagactagatgctgcaggggtgtttttttattacataggaaagttctctgaacttttctatgtaataaaaaccctccgggggatgcacacaatgtgcaaaggaaagctgctttgcagctgcacattggcgcacaaagctgccaagcccctcatgagtgaggggagggggagttgaagtgggcttgcccgctttgttctgtgataattaagtagttcatatggaaaacgacacaaaagatctatacaaccataaattttagaatttagaatgtcaaaattggaaaaactcaggacaaaaatatcaatgggatatgttgaccatggaaagtataataaaaccataaaataacagaaaattatgaatattggagggaaaaacaatgaaatatgtgacacaaccttatacgaaaccaagctatgatctaagctattttgaaaaattctcgccggacaggatgaaggcggtggcacttatggcggaagtgggccttccgttgtataagattcatcacagtattgccatcggtgatgtggctctgcttattgcagacggcgtagaaaaggctcatggaatcaaggtggatcgatatgtatgcgaaatgggggctttattacatgatgtgggaatcagtcaaattcagaaggatgatatgccagagcatgcttttataggagcccagattgccagagcagcaggttatccggaagaagtggccagatgcattgagcttcacgattttgcaggactgacgaaggaatacgtacaaggtgcaaatcttccttgtgtcatagacaaggaagacaagcttccagttacctgggaagaaaaaatcgttgcttatgcggatatgattgtatctcttgaaggagagtggtttatggatgtatggaaggatgatacctgtgcatgccgggcgtattatgatctgctttccattgtttttaagaccaggactggccgggtgctcaccaaggatcatccgcagttccggcatgaaatagagtttaacagagaaatgcgtcaatacatacccaaggatgtatatgagacaatccgccccagaattcttagaatgagggagtctatacgaatgaccggggaggaattgccgttcccatctttagatacctgggaataacaccaaaagatgaatggagagaaaaatatggagcggacgaaagataaccggcagatgtcaggagcagatttctggctgaaatatctcccagtggttctcatggtgatcgccttggtttatatagggaccaataatcattatttttttaaagtgaataatattatcagtgtacttttacagaccacctctctggctgttatggcaatgggaatgacattggtgctgataaccggaggaatagatctatctattccaccagtcatgggtttaagtgcgattttaggaacggtctttatgagaaatggtggaaatccatttctggcctttttgattatgcttttggtgggaattatctgtggtcttgtgaatgggatagccatagcgtatctgaaaatgattccttttattgtaaccctgtcattgcagatgattacctacggagcctgtctttggatagcggcagacggagtgaatggtgtgtcagatagctttaaaaatgttgttttagtcaaggtgggtggtttgatcccattggtcatacttgtgatgttcttgttaatggcagctgtgcagatttttcttaaaaacacttatttggggcgtcagctctacctggtgggaacgaacacaaaaatggcagatgtgtcaggagttgattcaaaaagaattatctgttctgtgtacgtgatatctggtgtgatggccgccttggccggtatggtctacgttgcaagaatgggtgctgcttctgcttcaatgggggcggatacagcggtgacagacattgtgggagcttccgtgatcggaggcgctagtaccagcggcggtattggcacagcagcaggagcggtattcggagcaatttttatcacaatcattggaaatgctgcaaatatgcttcatctttcctacaatatgaccatgatgctcaagggagttctgatcctggggtttgtggcgctggatatgtggagaagaaaacggaggggattataatgcatgaggttacattaaggatggagggcattaccaagagcttttcttctgtacaggttctcaagggggtggatctggaggcccgttctggggaggttctggcccttctgggtacaaatggagcgggaaagagtactttgatgaatatattgtgcggattgtttaagcaaaacagcggagtgatccagttggagggaaaggaagtaagctttaacaatcctacggaagccataaaagcaggaattgcttttgtacagcaggaaatgaccttaatgcccacaatgtctattgtagacaatttatttcttactaattatgaaaaaagagggggtctgatccagtatgctcccctaagggagaaatgcaaaaaagcactggctcgtttgggatgtaattatgatccagatacattggtgggaaatctgggagcaggagaccggcagcttgttcagattactcgttcattgctcatggacccccatatccttatatttgatgaagccacttcgtcacttacgcccagagagagacagcgtcttttttcggtgatacgctctttgagaggagaaggggctaccatcatctatattacgcatatgatggatgagatcaatgagatctgtgaccgtctgatggtgctcagagatggagtgagggcaggtgtaatggaggtgaaaaacttccagaaaagtgaactgatcaatatgatgatcggggacaaagcaaaagaaatgaatgcgtcccaccgcacagtaaaaagctttgaaaacagtccggtatatatgaaagtggacaattggacagagcagggtgttacagagaatattagtctggaaatacattccggagaggtggtggggctttgggggttattgggagccggacggacagagctggtgcggtccttatgcggtcttgatccagtggattcaggaaaagtgtctgtcattcatgataatgaacttaggcctatttcccctaaaagattattaaaagaaattgcatatgtaacagaggacagaagagtggatggactggccctggaattatctgtgaaggaaaacatgtcctcggcaaatctaaagtcacttaccaataagagcagtctgtttattgacaataaaaaagagctggaaatctgcgaaaaatatgtgaaggaactgtccattaaaatatcaagtatccatcagcctattcgaacactcagtgggggaaaccaacagaaggtgatcattggaagatggctgcagaagaatcctaaggtatacatttttgatgagcccacaagaggcttggatgtaggtgcgaaggcagatattctgaaaatgattcatgagctctctgatcagggagcagcggtattggtgatcatgtctgatattgaagagattatgggcgtctgccatcgtttcattgttctgcacagtggcagggtatctgcccaattgccttatactgcaacggaagaagagcttatggcagcagcagtaggagtggaggcataggaatatgaaaaaagaatggaatataaaagaatttttaatgaaatatggttttgttattattctgatcgctgttactgtatacttcggcctgactacaaataacttttttagtgtgaacaatgtgctgtctattctgcacaatgctgccccggtatttgttttttcagcaggggcatccatggttattatgtccggaatggtggatctgtctatcgggtctaccatgtaccttacagcagcaattgccacaatcatgatctccaggatgggagtgtccataccgattgtggcagcagtagtaatcctggtatgtattttaattggtggtattaatgggtgggtgatcgacaaatttgaaatgtcgccaatgatcgcaacaatggcaactatgatagctgtcaggggcttatctcagcagattaccaacagtgtggtgatttctcttccagactggctaagaaagctgaattccctgaaaattgcaggaatctatctggatatagtgatagcagtccttgtccttgttctgacccatgtgatacatagacgcacgtcctttggacgttatgtgacaactattggaaatgataaaagagtggcggaaaaactgggggttcatgtccggctggttacaatcaaaatgtatattttcagtgccctgctggcaggtctagccggtatcctcacagctatccagacagggggagttgccactacctttggatctgggaaagaatttacagccatatccgtggcggctataggtgggatcagtatgagcggaggttcgggaaaaatgctcacaggaataacccttggtgtattgaccttgtctattattgagagcggcctgaactttgcaggagcctctccctatgcctatcgttttgtacagggcggaatcatttttgtggcaatgtatgttcagtcctatcagtctatgattcgcgtaaaagcagcaaaggttgagacagaagcttgaattatggcgtaattttaagaataaatggggaaaacccataaaaattaaatcctaaaggaggataatataatgaaaaaaagattagtaagtgtcttgttgtgtgctgcgctcacaggtatgatgacggcaaacgcaacggctgttcaggcttcggaggatgcctctgtgaaagaaaaaacttcagaggatgcagcggcattgaacccagaggatgactttgacgcccagggaaaaatgatccgggtgggtctgtcctggcaggaaatgcagagttctattaatcaggcatggcaagattatttccaggagtattccaaaacctacggggaggcccataactgccaatttgaatggatcattacagttgcagacggagatccggcaaaagaaatgtccaatattcaagatttgatcaatcaggaagtggactgtattgtggcctgggcaaataatggagataccatcggagaatccattaaagcagcccaggaggcagacattccctttgtaacctttgaccatgaatctacttcagtaaaaccggatgcccatgtgggagaagacagctattcccaggcatatggaactgctaagaaaatggcagaaattcttaaggaaaagggagaaacagatgtaaaggctgttgttctccaggggtctcttacagataccaatgcaattgcccggggagaggcatggtctgctgtagaggaggaaactggtgcatgggagaccatagaatgggtgcctaccgactgggaagcagaaaaatttaagagcggccttgcaaatgctctggcggcacatccggatatcaatctgatttattgcgagagcgattttgcgtttaattcggtggcggcggccttggaagaagcagaaagactgtatcctatcggagacgaaaagcatgtgtatattgctgcagatgatgtccagcctcagggatatcaggggcaactggacggatatattgattgcggaaccacctacgatgcatggaatcaagcagttgcagtagtagaggcagtggctaagctatcttgtggtgtagaagtcccagagaaaaatctaattgaaggacgtctggctactccggacactgtagaatcactggataatctgtggtcaagagactattccgactaatggtcacattaaggagaagccggaactggtgaggtagagcggaatgtttatatagtcataaaatcagccggtttgtataaccggctgatttttatacataaaaactgcttccgttacaaaataagaaacctatttcttatggaacgaatagcaaaataagaaatgtggattgcaattgtattaatcgtcattacagaatttgcttgctataatgcaggcatacaaacaataaccggtttggataagaaaatattgaagaatagatggaggtttaaaaatggaaaataagatccgaaaattattaaaagaagggctgccgacagtgaacactcgaatctggagcacctggcctacaacggctgaggcagcagcagcttctggaagctttgactatcttgagtttctcgcagaatatgcaccatttactttaccggagctggaaaatttcgtaagagcctgcgagcttcaccagtgcggctctatgatcaaggttgatttccagaatcgaggctatgtagcccagaaggcaattgctatgggattccaggctgtgctttttacagatcatcagacagcagaacaggtaaaggaaaccatttatctggtatcaccagagtcacctgaatatggaggacgttttgggtatcccaacgccagatggcttggttacaacccggagccatcacagatggaatatgctgccatgaatgcaagctgtgtgaaagcatttatgattgagaaaaaggaggcagttgataatattgaagaaatttgttctgtaccaggagttgacatggtacagttcggcccctctgattattgtatgagccttggctggaacagcagtgaacataagaaagactggaaggctgcgcaaaagcatgtgatcgaagtagcgctggcacatggtgttgcaccacgtgtagagctttatgaccctgaagaggctgcagaatttatagaaatgggggtaaagcatttctgtattggagatgaatttgatatcttaaaggattattggtcaaatataggcggaaaaatgaagagtatgataaaaaaataagataatctaggaggaaaagatcgtgattgaaaagttgattattatgttgacccataacgatgtgacagttaaaaatgcaaaggagatttttgaagaaaacaaagaccttcctatcaagaactggggatttaaggatgtgggactggagccggatcagatgaaagaactatgccgcaggatgaaagaagcagggaaaactacatttcttgaggttgttacctactcagaagaggaatgcatgcgtggagcaaaattggcagtagagtgcggttttgactgtctgctgggcaccattttctatgattctgtggcagagtatgtaagaactacaaatttgaattattatccgtttgtgggcagggtctcccatagtccttctgtattggaagattcctgtgattacatgctagaacaggccagaagatttaaagaagccggcgctgtaggtgtggaccttctgggctatcggtacatagatggagatccaagcgtcctttctgctgcctttattaaagcaagtgtgcttcctacggttcttgcaggaagcattggatctgaagagcgtatgctcttagtaaaacagatggatccggcatattttaccatgggctctgcattgttcacgaagaattttgtgaaagatggttctttccgtgaaaatctggaggcagttgttgattttctgcagaagcagtaaagagaacaggaggtgtaaaggatgaaaaccaaaacaggtctggttgtggcagcaagtaaatatgaaagcggcggccagcgtgcagaagagttgatcgccgccggtggggcagcccttaagaaaaaaggtattacgcccatttgtggatcgaaaaccgtctgggatgcggcagatgccattgatgtatgcagagaattgaaggaccagaaggtggattctctcaccattgttttaagcacctgggtaacagattctctgctctatgttctggtccatgagatgcaggtacctgttgtattttgggcagttccctatacagaaaccttctccatcggttgtgttcagcattttggcagtgctctcactacccatggaattccctatgaatatgtatatggacttccaagcgatgaaaccatagttgacaaggtggcaaaggttgcgcaggtagggcggattatcaaggcagttaaaaatatgaagcttgctctggtaggcccaaggcagacctggcgtgtggcaggtccccaggatacaaccaacgaggagtgggaattttcaaataaatttggtgttactctagtacacattgagatggaagaaattgtgggaattgcagattccatctctgatgcagatgcaaaggagacctataattgcctgaaaaagcgtacgggaaaagtgatggcagatgaagatacgatggttcacatggcaaagatttatatggcaattaagaaaattgtgaaaaagtattctttggatgcacttgcagcagaatgttacccattctatagtgggttgatgaatcttccatccagctggctggcggatgaaagcattatcctggacacagaaggcgatattggccacacgatggtgatgtatatgctgaatctggcagcccagggcggtcctactgcattaggtgaggttggcagtatggatgatgagaacaatattctttcccttgcccatgagggaagctctgcccattctctggcagaatccattgaggatgtgcagatttccccaagcggtgacaaaggctgctttgtaggactgcctttgcgtccaatggacaaggtaactgtttccagtattcagggaaatggcaaagatggctaccagattctggtagaatccggcaaagtcataagggcagaccagcaggaatggattgacggaggggaaaagcttttagtaaagctggcattaaactgtaaagccagtgaggcagtggacagactgatgcaggcaggcatggaccaccatcttcttgtaaaggagggggactatacagagctgatgtcccttctgtgcaaatatatgaaggtaaaagaagttacctggaatctgtgaaaataaagcaatgaaagagcaggacgcgtaaacaaaattcctgtgatatgatggccgggaatgactcccggccatttcactcgttatggaaaggatgagaatgatatgaaaatcgtagtattagatggatatacagaaaatcccggagatatcagctgggctcctctagaagcacttggagaagttatggtttatgacaggacatcctatgtggaatctcctttgatcgccgaacggattggtgatgcccagattgttgtgatgaacaaaacacctatcagcaaaaaaacgattgatagttgtcctaatctaaaagcgatagcagttcttgctaccggatataatgttatcgattatgagtatgccaaagagaagggaatcccggttatgaatgtccctgtgtatggaactgacaatgtaagccagtttgccatcggtctccttttggaggcttgttcccatataggagagcataatgcatcggtacataaaggagagtggtctgcaaatgtggattggtgctactggcattaccctttgcttgaggtatccggcaagacggcaggtattatcgggcttggaaggatcgggattaatacagccaggatcctgcgggctatgaatgtgaatgttttggcttatgacgctttccaaagtgaagctgggaaggaaaccgcacaatatgttgaactggatgagcttcttagaaaatcagatttcattttcctgcactgtccgctctttccgtctacacagggaatcattaataaagaaaatatcgacaaaatgaaagatggagtgattattgtcaataatagccggggccccctaatcgtagaacaggatttgtatcaggcactggaaagtgggaaagtgggagctgccgcactggacgtagtgtccacggaacctattaaggaagacaatatgttgcttaaggcaaaaaattgtattctaacacctcatatatcttgggcgactaaagaggccagagagaggattatgaatactacggctgaaaatattaaggcttatattgctggaagtcctgaaaatgttgtaaataaataatcgtaaaaaagataccttagcaggtgcgtccagagctattgcccagtgggcattataaggcgggaacacataaacccgccttatcctattattctttcttgtaaatgggtaaataactatatggaaaatatatccagtagaagtgtggctaaaactgtaataaaatatttttagcagtactattttacaacgcggtgtgcactttggtattccacagggctgcagcccatgtactttttaaaggttttataaaaatagctgtaattattaaagcctacctgttcagccacatgggtgatggaatcataactttttaataaataagatgccacctcaattcttttttcctgaatgtagtttgtaagggtcttgcctgtagttttcttgaaaagacggcacaaataatgctcgctgtaatttacaataccggccaaatctgccagtgagatatcctcacccagatgtgtattgatataatcaagtatttcagagatgatctccatgtgctggacctcggttccgtccagatgttcaccatcgtaacaatcattgtaaacatacgccagaagctgatgaatgatggctttttgcataatatctttaccttgattcagggttgtctgctgatagccgtgaatcaaaagcacatatttttgcaggtcattttcctctagatgatagataggatgccgcgtgctgcaattatgaaagatatcaagcagattggaggttggggtactaaaagagatgagcaggcttagatttacagagatactgaagcgatagtagctgctgttcttatgctgctgaaggtaatgtggccggaacatatcaataagcaccagatccccgcgccggaccaagtattcttcattttcaatatgaaaaacaccggcatttcccaaataaattactaactcatagaaatcatgatagtgcagtccgtgattaaattcattagagggactgcgcagcatgccatcataatcccccttatatgcattgactttcgaaacaaattctgcattccccataatgtaatcctttccaaatttcttaattttaatgaatgaaagtaacaggttccctggcatttctttttttgctattgtatttgaaaaaattcgtaaagtcaatggaaatggctgtgcaatgtcaaaataggaaatggaaaagctaatgtagtatatggggtttccaagagatcatgtctatatttgttagtaacgacagagaagggaggaaaatcaatacatgaaaatggataaaagtcggggaaatacagcaaaaaataatcttttgggaagtgttcagattcttacggccactgtagtctggggatatggatatattgtgatccgcaattcgcttgatatcattccattaaatacgttaatgacttggagatatctcattgctttttctgtcttggccttagtgttctgcagaaggcttaaaatgattggaaagagaatggttgcagaaggagccgtattaggagcactgttatatttcagccagtatttccagacagcggcattgggcagggcagatactacagcaggaaaggtggcctttattacagcattgtatgtgatccttgtaccatttatgaattgggcggtttttcggaaaaaacctgggatttactgctttatatctgtgctcctggcattgcctggtctttatcttctcacctgtacaggcagcagctcaattggtcttggggatcttttggcactggtaggaagtattggtttttctgtacatattctggtcacagatcagtttattaagaaggatgatgcaatcctgcttacaatctttcaatttggatttgcagcagtatatggagggatcatacaggttttttcaggaacaggagcaggcatcggactgtggaatatggaaactttgtggccgctgatctatctgggcgttttcagtacaatgcttggttttgttatgcagcttcagggtcagaaatatcttttgccggaagtggccgctgtgcttttggcaacagaatccatatttggaatgctgttttccgtaatccttttaggggagcagcttacagggtatggaaaagcaggctgcctatgtatgttgggagcagtttggtttgcagagcaaaaaaagaaaccagatgatagataaaaacaatagcaaaattggaaatgtagaatgcaacaggttgaatggcatatttcttgtttaattgatatagtagtttcatcaattacaaaccggttaaatgtatatcttaaaaggaaaaaggagaaggactatgcaaaattacgtagtaaatgctcagagactgaaggacttcgagagaaaaatatttcaggccgtgggattgtctcaaacagatgctgaggctgttgcagaattacttgtacatgcagatttaagaaatgtgcgcagccatggagtacttcgaacagttccatatgtggaaaaaataagagatggcggtgcatctaaaactagtgaatatccaattgtatcagaaactgcaaatactgcagtgattgatgcgcaaggagggctgggcgcagtcgcgggcgaaaaagccgtgaaaatttccagagaaaaagcgaaaaagaatctcataagcatggtagtggtacgaaacagcaatcattttggaatgggcgggcattgggccatgaagctggctggagatgatatgatcgggtttgcctgttcgaatactgatctgactatgggaccacctcaatgcaaggaaccctttatggggaacaatccgtttgcttttgccttcaaggcaggagagaaatatccggaagtttgtgtggatatggcaacaagtggtgtggcttttggaaagtgtaaggatttagcaaagcgcggaaaagagattcccagcggctggatgctggaccgggagggaaatgacaccaggaaacttgaggactgctatatgatggtacctatgtctggccacaagggctttgggattgcctttatcatagagctttttgccacactgctttctggaggtgtgctttcccctgatattaataatcaggatctgacagatactccggagctctcaagtcagtgttttgcctgctttaatatctctgcttttagaaatctggaggaattccaagagagcgcacagagctacattgacagacttcatcagctccccatgaaggaaggggcaggagcggccaagtatccaggggaaattgagtatggctgtaaacagttcaatgtggcagaaggcgtggttcttccagaaacgctggcggatgacttaattgcccttggaagagatctgaatgtggatggtagtttcctgaaagagacgcaaactgaccgtcaatagacttgcaagaaaggatcatgagacttgcaccataggaaaaaggtaaaaggtatgaaattacttattggattagatattggcaccaccgcattaaaagccgcagtttttgatacagaaggaaaattgctggctgtttccacacaggaatatagcttaattactccccaggtaaactatgtggaggagtcaggagaagtttattggaaggcttttaaagatgtggtggcagatttaaagaaccagtaccccatgggggaagaggatgaagcagcactggcaatttctgcccagggagaaacactcttttttatgaataaagaggggaaactgctgaggaatgctattgtttggatggataatcgggcccaggaggaggctttgtacctgaaggaaacgcttggagatgaaaaatgcttccagatcaccggccaagtgagctttgaaccttgttggcctgcttccaagattttgtgggtgaaaaataatgagccagaggtctttgaaaagacagataaatttttacttatcgaagattattttatttaccgtatgactggcagggctgccacagagggatccttagtgtgctcctccacgtattgggatatcatccacaaatgttactggaaggaaatgctggatattttggaaattcaggaatcacagctggcccctgtctatgaatccggggaaagaatcggaaggatacttccagaggcagccctggagctgggacttccgtctaagctgacggtgtgtaccggggcgctggatcaggcggcaggtgccatcggcgccggaaattggaaagaggggatgttctcggagacaatcggggcagcactggctatctgtgcacctgtatcacgtccggtgtttgatcctaatcggagaatgcctcttcactatttcgcagttccggatacctatatgatccatacatttaccaacggagggatgactctgcgctggttccgtgataagttttgtccggtagaaatgcaggcccaggagctgggagtggatgatgcctataatatgataagcaaagaggtatcctctatacccgcaggcagtgatggtctgatcatgcttcctcatttagccggttctaatgcaccggatgtaaatgcaaaggcaaagggcgtatggtttggcttcacccttcagcatacgcgggcacattttatgcgttcccttatggagtccctggggtatattgtaaagaggaatattgatgcaatggctgatatgggaattcaggtgaaagaaatacgaagcttagggggaggctccaagagtgatgtgtggaaccagataaaatccgatatttgtcaagttcctctggaaactgtaaattctgtggaagccgcatccctaggtgccgccattctggcgggaaaggcggtgggaatatttgaaaatctcggtgaggcagtggagcgtatggtggctgtaaaagagcgcacagagcctaatccgcataacaaagaaatttatgaacaaggatatgaaatgtaccaaaaggtcttccgggatatgagggagtgttttgaaaagtcaatctgacaaattatcgattaggagaggtgaaaaaacttatgaaaaaaagaatgatagcagttgtaatggcagtccttatgtcaggtaccttaactgcctgcggaaatgaagaaaagcctttagaaaaagcttctgaagaaaaacctactaaagaaaaacctaccgaagagaaacctgcaaatgaagaagaaaaagcatcttcgggaaaatctgtcaccttaaagtttgcccatacggttccctccggtacggctaccgctgactgtattcagagattttgtgatgaggtgacagaggaatcaggaggaaagcttacaattgaatgctatccagattctcagctgggagatgatgatgaaatctgcgatcagatttataacggtgctcagatgctggactatgtagacccggccaaaatggaagattattatgcggattattctattttggttaccccatatttctttgaaagtgcagatgagattaaagaatttgcctggtcagaattaggacaggagctctctgatggctgtgcagcagcaggcatgaaatgtttggacaatatgggcggttattatggcgcaagggatattatgtccatggaggaaatcattaagcctgaggatatgaagaaaatgaaattccgcgtgccctccacgaccatgtgggtagcgatggcgaacgcatgggggaccaatgctacaacggtagctttttcggaggcatatacagctctaagtcagggcgtgattgattctattgaaaaccccgtaccatcaatgctttctgcaagcttccaggaggtatgtaagtatctgaatctgactcatcatatgtatgcggcaaacggtattgttatgaataatggcatatttgagggtctggacacagatatgcaggagctgctgactaagaaagcaaaagaattcgacgaatggacgtttgaagaaatatctgcagaagaggaagaagcgatcaagaagatggaggaagcaggggtcacggtgaatgatcaggtagatatggatgcatttaaagaagcctctgaaagcatctatgatacctattcaggctggtcagatgatttggcagaacggtgcaaagccacactcaatgagataagaggcaggtaggctttggttacagggggttattacgatgaaaaagattctgacgaatattgaagaaattgtaacaggaatcgcgttgggaatcatgactgttttggtggtgataaatgttttctgcaggctgttccttagcatcagtttttcatgggcagaggagatttcttatatttgttatgcctatgtgattttcgtaggggcaagtgcgctgtacaaaaggttcggccatagtgcgattgacctggtcgtacgtgcttttccgcgcaagctccaggctgtatgcgcagttttctctacaacaatgcttacggtcacaaacggactatgttttctcttaagcattggttactgtaattcctgttggactagaaggactcagcttctgaaaatcccgtattctgtggaagcgtttgcgttggttctgggctttggacttatgtttattcattcccttatgtttatgaaaaatattttcacaaagaaagattattatcatgagatacccatctataaaaacatttttaatgtggatgccctggaagaccagattcagtcttcgttagaacatcaactggaaaaaaaggaaaggggggagaaggacaatgcctaatttatggccgataataattgtttttgttttgtttttcttgggagttcctgttgcctttgcaatgttgatcgccagttttatctatttcacttttatgtgtgagggtgtaaccatattcactatggtatcttctctgcttacccaggcggaaagttttacgatgcttgcggttcctttctttataacagcaggtacagttatgggatatggaggggtatctgagaagctcatggatttctgtgaaatgcttaccggaaagtttaccggagggcttggggctgctaattgtctcttatcaacttttatgggcggaatttcaggttcctcttgtgcagatgcggcttttgaggcgaaaatgctagttccggaaatggaaaaacgtggctatacaaagggatatgcttctgctattacagctgcctcctcctgtataacccctatcattccacctggtatcgcattgattatttatgctacagcagccaactgctctattggggatatgtttatggcaggatatattcctggcattctgatatgcattgtacttatggtcactaattatgtcatatcgaaaaagcgaggctggaagccaactcgtactgaaaaggtgaagatatcggattttttcagccagcttggtaaatccatatgggctctgctcatgcctctaggaattattatgggaatgcgtctgggatggtttactcctacagaatgtgcggccattacagttgtatattcgacctttgtaggtgcggttatctataaaaaactgcggttaaagcatgtgaaaaggattgtggtggagtctgtaaatagtacagccagtgtagtactcattctttcctctgcgaatctgttttccagatatatggtttgggaaaacattccccagaaggctgctgctgctctggcttctgtggcatctaataagtttatattcattcttattgttctgttatttatgatggttctgggaatgttcctagatacagcggcagcacttgtaatcctgcctccccttttactgccagtggcaacggcactgggaattaatgtgatacattttggtattattctctgccttatggataccattggaggtatcacaccgccttttggggttatgatgtttgccgtaatgggggtcactaaggtatccataaaagattatctgaaagagggctggcctttgatagcagcagtatttgcagttattttgttggtttcttttgtgcctgagatcagcatgtttctggtaaaattataataattatacatagttattggcaattcatgtcaattggaaggagtaatcacttatgaataaagaagcaatttcagatgcaatgaacacactgacacatggtgtatatattttgggagtgcgcactggtgataaagaaaatctgatgactgctgcatggcttagccagatttcatcagctccacctatgattatggcagcggtgagtgagcctcatttaactgctgagatgattcggaaggcgggaacctttacagtgagtgtgctcagggacagtcaaaagcaggaagcaaggacctgcggagtgatatctgggcgaaaagcggataagacagagctggtggatgtagaatatagcccaagtaatattcccatgataaaaaacgcagccgctcagttagaatgtaaggtacttgatattcatgacaaaacaaatcacctgatgtttatcgcggaggtgacaagtgcgtcctatttggctgatgatgtgctggtatatcataaaaaggaattttttagttaggccagagaggaggggacatatgcgtattattcatcctgataatgcacaattttttatggacggaccggaggtctgccgacaatacgtcagtacaaataagattacctttgggacgtccacactgctgccaggacagacaggaggaacggatcctggacatccaaatggccatgagatttttttctgcagccggggacatgtggctgtatataatgagaaaagtgacaagtgttatgagcttagagaaggggacatccttcttattgaggagggagaaccccatcagatttctaatataggaagtgaaaccgctgtggtggcatggagctgtgcacccagaacggactgatcatgtttggttgattttggacccctgttggcaggcaggggtccaaagctgtgcttcggggctgaagcggacttgtgccctgtagaataaaggaacgccaatgatccaagatagctgatatagagtacctgacagatagtttcacggctaataatgttttccaggccgtatttccataaaaagacaatatctgttttataaatgctcgtcctggagtataatgtgagaaaaacacggtgttcaaaggccagggcaagatggcttatgagacgcgtagtgaggagtgggagaatgaagatctatgtagatgcagatgcctgtccggtaatctccattgtagaacgggtggcaaaaggctatcacattccagtggttctgctgtgtgatacaaatcatgtgctgaactctgaatatagtgaagtgaaaatcataggcgcgggtgctgatgcggttgattttgccttggtgggcttgtgcaggaaaggcgatgtggtggtgacgcaggattacggtgtggctgccatgatcctgggaaaaggggcctatgggattcaccagagcggcagatggtataccaacgagaacattgaccagatgctcatggaacgtcatctggcaaaaaaggccagaaagagcgcaaaaaatcatttaaagggtccggcgaagcgtacggtccaggacgacaggcagtttgaagaagcacttattcgtctgctggaaaaggtgattccatcaaatgattgagccagtttgtatattattgtcagaactagggaggtggataaaagatgaaagtagaagaaattaaagcatattgtatgagtaaatggaaagcctatgaggattctcctttcggggatgttcccatatgctaccggctaaataagaaaatatttgcgcagatatatccaaatccccaggattataaaattaccctgaaatgtacagttgacgcaggacagttttaccgccaggtatatccgggcgtagtagtaaggggatatttctgcccgccagtacagcagccttactggaatacgatttatctggataactttccagatgaagaattacagaatatgatcgaccatgcctatgatactctattgcacagtttcagtaagaaggtacaaaagcagattttaacggctgatgacctgaccatacgctgtatgaggcctgaggagtatccactgctggaggattttctctatgatgcaatttatgttccagacaatcaagtcctgccgccaagagagattatccggcagcctgaattgtatgtgtatattgaagattttgggcagccagatgatttaagtctggtggcggaatcccatggacacattttgggcgctgtgtggacgaggatacttgcaggagagagaagagggtatggaaatatagatgatcatacgccagagtttgcaatctctgtgaagaaggacttccgacgccagggaatcggaagaagactgatggaagagatgcttgtgctgttaaaaaataagggatatgagagagtttccctcagtgttaataaggataattatgcgtgcaggatgtaccaggaattggggtttcaaattattaaggagcaggaggatgactatttgatggtacgacagctccagaagaagtagagcagtgaaaacgattgactatctatgtgcgcattgtgcacgatttcatcctgaaaagcagagggtgttaagaaaacgagcggaagtgtaaattaggattggtggctttttctctttgaggacgttatacttatctcatcaagtggaaatgaggtgatgtaaatgacattgggaaatagtttctttcatgccaggaagaagtgcgggctttcacaggaggcagttgctgagaagcttggggtgagcaggcagaccatatcaaagtgggagacggatgagacattgccggatatccgccagtccaaacaaatggcgctgctgtacaacgtgtctttggatgatctgattgaattcgatgtggatgtgaaagagatcgagcagatcattttgcagacaagagaagagatcgaagataaaatcgactggacaagtgcctggggcaagaaatacccaattttgctgaaataccaggaggaggtcaacggggccagctatgcggtaagattaagtctgatgatcgatgagttaaaggaagagtatggatataacgagctggatgctttcttagttttaaaggatatcctggcaaaagtgtggaaatccagaaagaaatgattgatttctgatcagaatgttaggggtgtgtctaataggataaagagaaaaagaaataaatctcaacttcataaatttataaaggagaatcaacgatatgaaaactataggtttaattggcggcatgagttgggaaagtacggttacttattataagatcataaacgaaacagtaaaagagaagttaggtggacttcactccgctaaaattcttttatatagtgtggattttgctgaaattgaagaatgtcaggcaacgggaaactgggaaaaaagtgcagatatacttaaagaagcagctcttaaactgcaaaatgcaggagcagattttattgtggtttgtacaaatactatgcataaggttgcaccagaaatccaggaaaaaataaggatacccattcttcatattgcagatgcaacagcagatgagctgctcaaatcaggagtgaaaacagttgcactgctgggaacaaaatatactatgacgcaagcgttttacaaggaaagacttaccgcaagagggatcgaagtattgattcctgataaatctgatattgaattaataaatcacgttatttacgatgaactgtgtttaggaaatatttctgaagaatctcgtaaagaatacaaacgcataatctcttcattaaaagataaaggtgcgcagggagtaattcttggatgtaccgagataggactgctgattcagcagaaagattctcccgtaccggtattcgacacaacactgattcatgcaaataaagcagcaacagctgcaattaaatagtaggatgaatgataactgtagattataaattttagtttgccgggctgaaaacaggaccgtctatggctggttaaaggcattcttcatatcttcagggaccggtgcctggaacagcaggggctgtccggtgaccgggtgacagaattccagttgataggagtgaagggcctggcggtggatccggtcatatttgggataatagagataatctccaataaggggatatcccaggaaacccatgtggacccggatctggtgggtgcgtccggtctccaggtgaagctgggccagggaaaggccgttttgataagccagacgttcaaaatgtgtgcaggcaggctcccctttttgaaaatccactgtgcgcaggatggcagagttttctgcccggccgatgggggcctggatggtaccggacaggggcagcttcccttgggttaaagccagataggtccgccggatctggcggtttttcatctggtggcccagcagggaggcactgtaggcatttttggccaaaatgagagccccggtagtatctctgtccaggcggttgatgcaccggtatacatagggttctcccttttgggcaaagtaccaggcaacgccgttggccagtgtattttcatggtttccaaaggagggatggatgggggtgtcggcatccttattgatcaccagaagatcctggtcctcatagaggattttcagcttcatgggaacaggagtaatattgggagaggcctcttcatccaaaagacggacccgcagaaggtctccggcctttagacaatggctgccatataccgcttctccgtttaaaagaagaccctgaggtacagtcttcagagctgtcagcatgtgcctggaaaagccttttttcttaagaaaatccagaacctttgtgccctcatccccggaagcgatgggaaatgaaagaagcctttccattagaattctccctcctttgtttttgttcacggataattggagcaggaacgttctttcctattccatatttggtttctgtatcatatcacaattcattgactttttccattagaaactatataattattcagatagcaatgaccattaggtactgttcattaggtggccagtactgtggcagtaagcgtatgggcagaggctttatgaaccagcgttctcaggttctgccctacttaacagaattgaagaaaatgccgtattggaatcaggtgaaagtcctgtacaagtccgttactgtgaaagtcagatacaagcggttttttcaggaaacgggattccctgcggcaaccggggcggccggaaaggagaagcacggatgttgtcattttgacagcatctttttttcgtatggctcatttgacaggtctggaagactattatgtaataaaaaataagaaaaaaatgcgttacgggtataccacaggctcctgtgcggctggggcggccaagggggcggtgcgcatgctgctctttggagaaccgctttcccaggtggagctgatgacccccaagggaattctgctgaacctggagctgacggacgtggttatggataaggagcaggttacctgtgccgtgagaaaagatgggggagatgacccggacaatacccacggacttctcatctatgccacagtgtgcaaaactacccacaaagggattaccattgatggggggaaaggcgtgggcagggtgacaaagccggggctttggcagaaggtgggagaggcagccatcaatcgggtgccccaggccatgatcagaagagaagtggaggaggcctgcgtggaagcggattatgaaggtgggatccaggtggtcatcaccgtgccccagggagaaactgctgcccaaaagacctttaatccccgtcttggtattgtgggcgggatttctattttaggcaccagcggcattgtggagcccatgagcgaagccgcactggtggagagcatccgtctggaaatgagccagaaggtgagccagggggaggtctatctccttgtgaccccgggaaactacggggaggagtatcttcgggagcatatggacttgccctttgaaaaaaatatgaagtgcagcaattatgtgggtgagaccattgatatggcggtggatctgggggtgaagggaattctcttcgtatctcatattggaaagtttgtgaaggtgggggcagggatcatgaatacccattcccacagcgcagatggccgtatggaggttttgtgtgcctgtgccctcagagcaggggcagaacgggacactgcctgtcaggtgcttgcctgcagtaccaccgatgaggctttggatgtgctgaaaaaggcgggaatccttgaaaaagccatggacggtctcatggataaaatgcaatattatctggaccatcgctcctatgagcagattgtactgggagccgtggtgttttccaatacccacggatttctgggcatgaccagagaggcttcaggacttatagagaaattaaataaaatgcagatggataaaggagaagataaatgagcggtaaattatatggtgtgggggtgggcccgggagacccggagctgctcaccttaaaggccctgcgcctgatcagggaggcagatgtgatcgcggttcctgcagaaaaccccagggacagcattgcctataaaatcgtggagggcgcttatggggaacttggaagcaaggagcttctggcagtttccatgcccatgacaaaggacgccgaaaagctggacacttaccacagccaggcagcccaggcagtaaaggaaaagctggaggaaggaaaacaggtggtgtttctcacactgggagaccccacggtgtattccacctatctgtatgtacataaacgaattgtagacatgggctatgacacagagatcgtcagcgggatcccctccttttgtgctgtgtccgcccgcctgaatcagggccttgtggagcaggcccagccccttcatgtgatcccggcctcctatcagattgaggaaggccttaagcttccgggcactaaggtgctgatgaaagctggaaagaaaatgaaggcggtaaaggaagagatgagggctcttggagagacaggaatgatgattgaaaactgcggtatggaaaatgagaaaatctaccggagtttggaggaaattcccgacaatgcaggctattattcattgatcatagtgaaggataagaaggagaacaacaaatgatacattttgtaggcgccggaagcggtgcggcagatctaataaccctccggggaaaacatatgctggagcaggcggatgtgatcatctatgcaggctctctggtaaatcctcagcttttggactatgccagggaagactgccagatatacaacagtgcgaaaatgaccctggagcaggtgctggaggtaatggaacaggcagaggctgatcataagaccaccgtgcgccttcacacaggagatccctccctgtatggggcgatccgggagcagatggatgtgctggaggaaaagggcatttcctatgattattgtccgggagtgagctccttttgcggagctgccagcgctttgaatctggaatataccctgcccaatatttcccagagtgtgatcatcacccgtatggccggcagaacgcctgtgccggagaaagagagcattgaggcctttgctgcccatcaggccaccatggtggttttcttaagtacagggatgctggaggagctgagcagacggctgatcgccggcggataccagaaagacaccccggcagccattgtgtacaaggctacctgggaggatgagaagaagttcgtgtgcacagtgggtaccctggcacagaccgccagggacaatcatattacaaagacagccctgatgatcatcggggatgtggtgaacacagcccattatgaccgctcaaaattatatgatccggagtttacaaccgaattccgggaggcaagtaaataaatgaagaagctggaaaaggacggctgtctgggccagttgagaagcttaagcatcctggccttcagccccacaggctatgaggccggcaaaagggtgaagcagggtctggaaaagacagggatgcaggtgaccgttcagggaaaaagtaaatatctgccacaatctgtcccggaatccttacaggaatggacaagacggcagtttgaagaatccagggacggaattttgtttatcggctcctgcgggatcgccgtgcgggccatagctccctttgtggacagtaagaaaaccgaccctgctgttgtggtcatggatgaaaggggaacctttgtcatttctcttttgtccggccatctgggaggtgcaaatgagctgacgcaggtgatcgcacagatcatggacgccgtgcctgtggtcaccacagccacagatgtgcatgggcgctttgcggtggatgtttttgcaagaaaaaatcattgttctttgattccacttaagggaataaaagcagtttctgccgcccttctggctggagagcgggtaggcttttacagtgaattccctgtaaagggagaacttccagcagggcttgttgaatgtacaagagaaggaaaccctcaaaaacctactataaatgaaaagcctgctataggcatcgcagtgaccatggcaagggcggttccgccctttgacacaaccctgtgggtggttccgccctgtgtcaccgcgggtatgggatgtaaaaagaacaccccgtatcaggcattggaagaggcactggccgcctccttggaggagctggagatttttcctgaggccctgggcaggattgccagcattgatataaaggcaaaggagccgggacttttgaacctgtgccaaagccggggcatcccctatgtgacgtattcaaaggaagtccttggggaagtgaagggccaatttacagcctctgcctttgtggccagtgtggcaggggtggacaatgtatgtgagagaagtgcggttctggccgcagagaatggaaaactgatacagagaaaaagggcgtaccagggaattaccattgccctggccctggaagaatggagtgtgtattttgaataaattatatgttgtgggcattggcccgggagcttatgagcagatgacaggcaaggctgcggctgccctaaggtccagtgacaccatcatcggctatacagtttatgtggatttggtgaaggaatattttccagacaaggaatttctcaccacacccatgaaaaaagaggtagaccgctgtgttctggcttttgaggaggcccaaaagggaaaaaccgtttccatgatctgttcgggagatgcaggggtatatggcatgtccggcctgatgtacgaggtaggtgtgaattatccacaggtggagctggagatcattcctggggttactgcagcaaccggaggagcggcggtgctgggagcgcccctgatccatgatttctgcctgatcagcctcagtgacctgctcaccccatgggagaagattgaggcccgtcttttggcagcctcccaggcagattttgtcatctgtctatataatccctccagcaagaagcgccatgactatctgaagaaggcctgccaacttatgatgcagtacaaatccccggatactgtgtgcggcatagtggggaacattgccagagacggagagttttcaaaagtgatgaccctgaaggagttggcagaaacccaggtagatatgtttaccactgtgtttgtgggcaattcccagacaaagaacctagatggaaagatggtcacacccagaggatatcgaaatgtataacgcttccccagacacagagaaaaacagggccaaaaggcaccaggtcattgtgtttgccgggaccacagaaggctatgccatcagcagctatcttgcagagcatgaccttggggtcctggcctgtgttgccacggattacggccggaaggccctggaggaaaaggaaaatttacaagtctcagccgcccgcctggaggagaagcagatggaggccctcttcacacaagtctcacccaaggtggtggtggatgccacccatccttatgcggaggtggtaacggaaaatatccgcacagcctgtgaacgcacaggcactgtctatgtgcgccttctaagggctcagagcaccatggaggagcaggcagtgtatgtggacagtgtgcaggaggcagcggcctatctggagcatacgaagggaaatattctggtgactacaggaagtaaggagctggctgccttcactcagcttacggattatcaggaacgggtatttgcccgggtcctctccctgcccttggtggcacagtcctgtgcggccctgggatttgaaggaaaacatctgatctgtatgcaggggcctttttctcaggagatgaaccaggccatgctccgccagtacgactgccgttatctggtgacaaaggattctggcagggcaggaggctttctggaaaagtatcaggcagcccttaactgcggagctgtacctgtgattatcggaaggcccaagacagaggaaggcctgtcctatgaggaatgtgtgaactatctgcaaaagctgctggacatctgcccaaagagacggatttccctggtggggattggtatgggtagtgagggaagcctcaccctggagggacagcaggtcctgaaggaggcccagcttctcattggagccaggcgtatggtggacactgtgagaaaacctggtcaggcagtatgctatgaatatcaaagtgaggccattgtccagtatatccaggaccacccacagtacgagcgggttgctgtggcactgtcgggagatgtgggcttttacagcggggccaagaagcttctggatgcgttgaagggagaggccgatttggtgtgcgggatttcctctgtggtgtatttcatggctaagatcggtctgtcctgggaggatgctacaatcctcagcgcccatggaagaaactgcaatctggcggcccatatccgtcagaaggagaaggttttttccattctgggctcaggggacgccgtggcggcacttgctcaaaagctggtgcactacaaaatgggagaggttctcttatatgtgggagaacgtctgtcctatccccaggagaagattttccaggccaaagcttgtgagctgactgcctatgagggagatcccttaagcgtggtgtgtgcggtgaacccccatccccagcccttaaatgctacccatggaatccctgaccaggaatttatcagagggaaggcccctatgacaaaggaggaggtgcgcaccatctccttgtcaaagcttgggctgaagacagattctgtgtgctatgatgtaggggcaggcacaggctcggtgtccattgagatggccttgcgggccacccagggcagagtttacgccattgagaaaaaggaagaggcagccgcccttattgaggaaaataagaagaaatttgccgtggacaatctgtctgtgatctccggtcttgccccagaggcattggagggactacaggcgcccacccatgcctttatcggcggctcctccgggaatcttaaggagatcatggaatgcctccttaagaaaaatcctcaggtgcgattggtcatcaactgtattaccctggagacggtggcggaggcagtatctgcaataaaagagcttgccctttcccactctgagatcgtacaggtgtctgtgtccagggcaaaggttcttggaaactatcatatgatgatgggagagaatcccatttacattatttcctgtgagaggtaagcaaccatgaagatacccagaatccttctggcagcaggggccagcggaagcggaaaaacattgatcacctgcggccttctgcaggctttggtgaaccggggactgaaaacagcctcctttaagtgcgggccggattacatagaccctatgttccacagccgtgttattggggctaagtcccggaacctggatacattttttactggagaggagcttacacggtatctacttatggaaaattccaaagaccaggatctaggggttatggagggggtcatgggcttttacgacggtgtggggggaaccacggtgaaggccagcgcctatgacctggccagagtgacggacacccctgtgatcctgattgtaaacagcagaggaatgagcctttccctggcagcttatattaagggctttttggaatatcaaaaggacagccacatacagggagtgatctttaaccaaatgtcccccatgctctatcccaggatgaaggagctggtggaaagggagcttcccgtgaaggtcctggggtatgtacccaaggtggaggactgtgtcattgaaagccgccatctgggccttgttctgccccatgagatccaaggactgaaggagcgcctgcagaagctggcaaggatccttgaggacaccctggatctggagggaatcctcgccctggccggtgaggcaggggagctgacaacggtctccccccaaaagcttcatcccctgctgggctttcgcctggaagagccggtgtccatcggagtggccatggatgaagccttctgctttttctatgaggacaacttccgcctgctggaggccatgggagccagactggtgcccttctcccccataagggatgagcatctgccaaagggactgcacggccttcttctgtacgggggttacccggagctgaacgcaaaagcactggaggaaaatatctccatgcgccgggaactcaaagcggcattggatagggggatgccctgcatggcagagtgcggaggctttatgtatctccatgaatttatggaggatatggagtgcgtccggcgaaggggcgtgggagtcataaaaggagaggtgtaccgtaccccaaagcttgccagattcggatatatcacagcccagcagcaaagggctgtgtttggggaagcgaagctgggtcctctgcctgcccatgaatttcactattttgattccaccagctgcggagatgccttctatggagcaaagccagagagcgccaggggatgggaatgcatccatggatcagataccctgtgtgctggctttccgcatttccattattacggcaatccctctctgcccgctgcctttttaagacagtgtgagaggtataagaacatacagcaaaggagcggctcatgatgttatatggaatcctggcacttgtagccgggtacattttagatttgtgttttggtgaccccagatggctttatcatccggtgtgtgccattggaaagctgatcagcctgttggaaaaggggatacggaaagtatttccagattcccagaagggagagctggcgggagggcttgcggaagtggttgtggtctgtcttgtgtgctttttcctgccctttggaattttgtactttttataccggctgaatcctgtggcgggggtggtcctggaaaccttctggtgctaccagcttctggccaccagatctctgaaaacagagagtatgcgggtctatgacaagctgagatacggtactatccaggaggccagatctgccgtatccatgatcgtgggaagggatacccaggagctggacgaggaaggggttaccaaggcagcggtggagactgtggcagaaaatacttcagacggcattatcgcccccatgttttatatggctgtgggaggcgtgcctctgatgtttttgtacaaagccatcaataccatggattccatgctgggctataaaaacgagaaatatctttatttcggcagatgtgctgccaagctggacgacctggtgaattacctgccagccagaatctccggatggctgatggtgctggccagctatctgtgcggcctggacggaaaaaacgccaggcggatcttcctgcgggacaggcggaaccatgccagccccaactccgcccagacggaggcggttatggcgggagcgctgaatgtacagcttgcaggaaatgcctggtatttcggcagactttatgaaaagcccaccattggcgatccacagcgtcccattgagcctgaggatatcagaaaggcaaaccgtcttctttatacctcctccatggcggccctgtgggtgttcctgattttacatgccctgatctggtcaggactttatgcctttttcctataaagagggctttgtttatcatacatagaaacagcgaggagtaaacccatgaaaaaacatatacacgggggagatgtgtacaagaatcaaaactgcctggacttttcagcaaactgcaatcccctgggaacaccggacagtgtaaaacaagccattatcgctgccttggatggagccgccaattacccccaggtgggctgcggtcccttgaaggaggccatcgccgcctacgagggagtgaagagctcctacgtgatctgcggcaacggggcggcggagctgatctataccatctgcagggcagggaagccttccagggcattaatcccggtgcccaccttcgcagagtatgaacaggcgctgatcagcgtaggctgccagatccggcgctattggatggaagaggattttgtgctggatgaagcctttttgggagagcttaccaaggatctggatattgtcttcttgtgcaatcccaacaatcccacaggccttctcattgacagggagctgatgaagcgcattttggacctttgccgggacaaggaaattttcctggtggtggatgagtgcttcctggattttgtgaaggagggggaagactggtccctgaaaaccgatcttacacagtatcccaatcttttcttgctgaaggcgtttaccaagcggtatgccatggcggggatccggctgggttatggtcttacaggcaatgtgggacttttggagcagatggagcaggtgaaccagccctggaatgtatccagcctggcccaggcagcgggaatcgctgccctaagggagagggcttatgtgcaggagggacaggcccttgtgtggaaagagcgggagctgctaaaaggggagctggccgctctgggactgaagatctttgattcacaggcaaactatatttttttccaggggccccaggatttgtgggaaaagtgccgggaaaaggggattctcatccgggactgcagcaattaccagggcctgactaaaggctggtaccggatcgcggtgcgcacagcacaggaaaatcaaaggctgctgtctgttatgaggcaggtactgtaggtgagaattcacagcatgaggaaaagaggaagaagctatggcaaaagcaatcatggtgcaggggaccatgtccaatgcgggcaaaagccttctggctgcgggactttgcagaatatttaagcaggacgggtaccgggtggcaccctttaaatcacagaatatggccttgaattcctttatcaccaaggaaggcctggagatgggacgggcccaggtaatgcaggctgaggcggcagggatttccccttccgtgctcatgaaccccatccttctcaagcccaccaatgacgtgggcagccaggtgatcgtaaacggtgaggttttagggaccatgagcgccagggattattttgcttataagaaaaagctggtgccggatattcagaaggcctatgataccctggccaaggaatatgacattattgtcctggagggagccggaagtccggcggagatcaacctaaaggaggacgatgtggtgaacatgggcatggccaggatggccaaggctccggtacttctggtgggcgacattgaccggggcggggtatttgcccagcttatgggcacggtgatgcttctggaggaagaggagcggtccatggtcaaggggctgatcattaataaattccggggagataagaccattttggacccgggagttgagatgctggagaaaatggccgggattcccgttgtgggagtggcaccttacctgaatattcaggtggaggatgaggacagccttacagagcggttcagcggcagccagcaggtggatgctattgacattggggtggtgcgcatacccaggatttccaattttacagattttaatccactggagagcatacccggcgtgtccctgcggtatatcaaacaagtgtcggagctgaaaaatccggacatgatcattatcccaggtaccaagaacaccatggaggaccttctgtggatgcgccagaatggtctggaggccgccattttgaaggcggcaggtgcagggaccattgtattcggcatctgcggaggttaccagatgctgggacgcagcctgtcagatccttatggagtggaggcagggggaagtattgccggaatggggcttctcccaatggacactgtgtttgccaagaccaagaccaggacgcaggtggagggcaccttcaaccatctcacaggagatctcagggagctttccggtgtgcccctgcagggctatgaaatccatatgggggacagtgtcctggataaagaggcacagcctgcggcttatcttcaagatcaggtgactgggacaaaaaagccggacggggctttttgtaagaatgtgtacggcacctatgttcacggagtatttgacagggaagaggtggcagaggcagtggtgcgggccattggaaagaagaagggactggatgtaagtgagatgaccggggtggatttccagaaatttaaggagacccagtatgatcttctggcagctggtctgcgggagcatttggacatgaagaaaatctatgaaatcctggaagcaggaatctgaaagggtgaggacagtgaaaatagaactggaaaatgtaaaaccaatggatattgaaaagagaagttttgagatcatcacccaggagctgggagatacgcccctggcgcctgggaccgagctggtagtaaagcgctgtatccacaccagcgcagattttgactatgccaaaaatctgtgcttctcagaaaatgcagtggaaaaggccatagaggccattcaaaagggagcctgcattgtcaccgacacccagatggccaagtccgggatcaacaaaaaggctctggccaggtacggcggccaggtgtactgcttcatgtcagatgaagatgtggctgcacttgccaaggaaaaaggaagcacccgggccacagtgagcatggataaggcggcagcccttccccaaaagctgatctttgctattggaaatgcccccacggcgttggtgcgcctgtatgagctgattcaggaaggaacgctttctccggagctgatcattggggtgcctgtgggttttgtgaacgtggtccagtccaaggagctgatcatggatgccggagtgccttatattgtagccagagggcgcaagggcggcagcaatattgccgcttgtattgtgaacgccctgttgtacatgattgataaccgcagggattaagctatgaaaatacagttgatcgccagtgatctggacggaaccctgctcactgataagaaggagctgtcgcctttgaacaggcaggccctgttgtgggccatggatcagggggtgcattttatcactgccaccgggcgggcctttggggcagtgcccggggagctgaaggagctgcccggagcggaatatatcattacctccaacggtggggcggtgtactccatttcagccggaaagaggatttaccagtgcctgctggcaccaaaatcggtggaggagatcctgaagcttccctgcctggaacaggtggttctggaagctttcgtggaggggattccctattcggataaagggtatgtggcagaccccaagagctttggagccacagactatggggcagcctatgtgcagcgcacccgcaggccggtggaggacatgagggcgtttgtaaaagaacatgctggctgcctggacagtatcgcctttgtgtccggggatgaaaataccagagccttgcttcgaaggcttctgcaggagcgggtaccaggcatctatatcacctcctccatcaaccatttggtggagatcggacacgaggacgcaggaaaagggaaaacccttcaatggctgcttgataagctggggatctccccggaacacgccatggcttttggagatgcagacaatgatattggaatgctctcccttgtaaagtattctgtggccatgggaaatgcttcccctttgtgcgcgcaggcagcggcttaccacacagcgtccaatgaggaggacggagtgggaaaagcagttttccggcttctaagcactggggactgagctgccggacaggcagggaactggaacaggaccggagaatggcaggaataatttttgaaaacagatgtgaataagaattacagaaaacacattaataataactacagaaaacagatgaagcataattttagaaaacagattgacaacagtaaaggtctgtgttaggatttatacagaccaacggtctgtatggagggattggatgtcaagaaacaaatatccggaagagacagtgaaacggatcatggatgcggccgcaatactttttatggagaaggggtatgacaaaacctctctccaggacattatcaacgccactggtctttccaaaggcgccatataccaccattttgcatcaaaggaagagatctttgtgaaaatttgtgacagcattggagcgcaaaatgctgccgctattgtgaaggtgcgagatgacaagaatctgaacggactgcagaagctcaaagaaatttttcgtgtggctcttacgatgcccacacagaggcagatgctgtccatggttccctatcttgtggataaccccagatttctggcaatacagatacaggatctgtacaaggaagtggtgcccgaatatctgctgcccattctaaaggagggtgttgcagacggttccatacacacagagcatcccagggagctggccgaggtgatcatgatgctgtccaatatctggatgcatccactgatgcagccaaccaccgtggaggctgtggaggcaaggtgtctggtgttcaaggaactgatggagggaatcggcctggatttaatggaccaggagctgattgatacctatgtggattttgaaagatttctggaggagcacaatcacacctgtcaaaaccctcatgagtgagggatagggcgttgaagcccttggccacgttgttatgcaaaagaaaaatggccgcaggcggctgcgtttcggtgcgccagtccggtagcaggcctttttttataagaatatacaaaccgacggtcggtttgaagaaggagaagatttatgaatacaaaattgtttcaaagagattttacccttgtggtgatggggcagatcatctcactttttggaaatgccatcctgcggttcgcccttcccctgtatcttttaagggagacaggatcttccaccctttttggggcagtgactgcctgttcgtttatcccaatgatccttctgggaattatgggaggggttctggcagaccgggtgaacaagcggaatatcatggtgttattggatttttccacagcggctttgatcctggctttttatcttgtcttgggaaaggttcccattgttccgctgatgattgtggttctcatgcttttgtacggaatttccggggcgtaccagccgtccgtacaggccagcattcctctgttggtgcaggagaaggctcttatgcagggaaatgcggtgatcaatatggtcagtaccctggctgggcttttggggccggtgatcggagggattttatttggtatttgggggatcacgccgattcttttgatcagcgtggggtgcttttggttttctgcagttatggagattttcattcacattcccttccaaaaacaggagacgaagacaggcttctttcctaccattgcaagtgacttaaaggaaagctggagctttgtaaagacggagaagccggaatttctttcggtagtgggagttctggcactttttaacctggtgttgtcagcggctatgatcgttggcattccgatcatggtggtaaatgtattaaagatgtcagacgcccgtctgggatatgtccagggagctctgggcctggggggactggccggggggattgcagccggcgcccttgcctccaggatcaaactccatcacagctatcttctgctccttttctgcgggatctgtgcaggaggcatgggggcggctctattgccagtactgcctccgggggtgagctatgggattcttttggcagcaggatttgcagctatggcagcctgtaccttatttacagttcagatgatcacccttgtgcagcagcagaccccgccccatctggtggggaagatcatggccgtgatcatagccttgtctgggtgctcccagcctttgggacaattgctttacggtatactgttcgatgtgtgcggccagattccttgggcagttatggccggctccgcagctgcggcctgtttcatcgccttgtattccaaaagtacctttcacaggttggaaaggacagaagagattggatttagacaggggaaggcaaggcagcagaacgtatagaagaaaatagacggcagaaagagcaatggaaaattgttgacatggaaacaaaaacaatgtatattgattccaaggaaacaaaaaggaggccgctatggaagaagaggtactggatctgtttaaagagcatttggagaagcaggaggtactgtccagactcacagaggcggaggtgctgcatggactggggtattcggagattcactgtatttctgccattgggcatatggagcatccaaacgtgacgaaaattgcagggaggatgaagcttacaagaggcgcagtgagcaagatcacgaaaaagctgatgtccaatggctccattgtgtgctacagtctgccgggaaataaaaaagagatttattttcagctgacagatgatggcaaagagctttttgtggagcatgagaagcgtcatgagatctggaagcagcgggaccgggagtttttcaataaatactcccgggaacagctggaggctgttagggcttttatggcagattttaatcaatatttggaagagaagatcaaggatttgggaggaaaagaggatgtataaagatttgacggtgagggtgacgccgaaaatgacaagggatgcccagggaaatgaaaagaaggccagcttcggccatttgggcacgcattttgatgtgatggacaaggaatttcccttggaaaaccttagacgcgccggggtgtttttcgatgtgtctaagattatggaccggaatattgaaccagaggatatctccctggaggagattcagcctggcgactttgtgattttttatacgggttttctggagaaggctggttatggaacatcccggtatttcaaagagcatccccagctctctctacggcttattgacctgctcatagaggccggaccatccatgatcggtattgactgcccaggagtgagaagaggggcggagcatacccccacggaccaatactgtgcagatcatggaatatttattattgaaaatctctgcagcctgcagcaggtgcttcaaggccgtgcttcagcaaaatgctgggtaaacacctatcctgtgaatttccagggaatgactgggctgccatgcagagtgacggccgaggataaagaatagcggtaacagcagtgttgagacttagcggctttttctggtatgtgattcctttgcccagaatcccagaagtcctgctgtaagtatggaccagtttatgtagataataagtgcatatctgtcattaggaggtgcaccgtctccaaggcagaaccatagagtgaagatgattcccattgcccagaagggcatcattttcccaagaagaaggaggacatttcggtcctctttttttcttatggccaaaagggtgagaaggattccaaaaccaaataaaataaggaaggaatattgataataggagttgtatgtctttgtgagttccggggttttggaggacatgcagtgtacgttccaggaatcccctttattgcacagccctttggcatttagaagggaagagacaggggtggcggccattgcggccatatcctctccaatatcctgaagcacctttttcgtttgattggcaaacacgatctttgccatttgccggtacatctgtccggctttttcttttcctaccttttcctcaaggagaggtgccatctgatacatgacgttattgttatgcctgtcaaagatctgggcatcctcaagggtgaccgcatttttaatttcctctggaaagctgtcataattggcggccatgttgggccatacgatccggtccaaaagaatgaaatccaaattggtctcaatccttccgttgagccccggggtctgtgtcagccatccaacccctttggttattccgggaaccaggagacagatacacaacatggctgtgaggattctggggcggtttttccggctttttgccagcttgatcacaaaggcaagcactgccagaaggagacagctgtacaggcggtcagcccttaaaaggcattctatgagcaaggcggcggccatgagaacgtaatttgatgcaggcagatattctttggaaaacagaagcaccagatttgccaaaaaaacaaggagcatggaggtggccagggaatctgtaaggatacagaagttcataaaggtcatcatggggattgtcagcagatacagactcaaaaagatctgtgacaaccgcctttttaaagaaaaacggctgtcttttccaataaccttgtctagtgttgatacgccatataatagcgtcacaaaggagagggctgtctgaaaaagatatagccaggtttgaaagggcactggcgtcaggcttcccaatttttgaatgtaccgcagcaggagcgggtataaaatggggcggtattcatccagggccagggtttcactgagatttagatactctgtgctgtccccgaaagcagggatgacgctgctgttttggatcatccagaaaatgcccatgaggatctgaagggtcattaccagaaaaacggccacagatacaatctggggcagcattgttttattttgctttttcataatttttctcacctctgtgaaaaatcaattggttttgtattttgtagctgataaaaaacaggatggtgtctactaatattttaacggctacttcgtctattttcaggagccagtgaagtccctccacgcacagggcagagcagactgcctggaaaatgcacagaagaaaatagcggactgcgcaggatacgtaggattcccggcttttaaaaactacattccggttcatacagaaattgtaggaggcggatatcagtctggctagtcctgtggacagaataatccggtatgggattccttgaagaacaattttcgataatagggtaaatagcaaaatatcaagtactgaggaactcaaagaagaaaaaatataccggaaaaatgttccgaaaattgttctgtaaatttttatagaatctgcaatggggttaaaatgggttcctttattttcttcatagtagacggtttcaatgggaacctccaggacaccggatttgcgtcctacctgagtgagcatggctgtttcgtattcaaagcgttttccaggaatgttcagacaggaatcgatcaaaccatttgggattccccggagcccggtctgggtatcgcttacctgaaagcgcagcagacagcggaaaatccaggaagtcatgttgtttccaaagcggcttttggggggaacctgaggaagagaaaaatccctggagccaagtacaagggcagtggttccggacagaagcttttcggcaatcttctcaacgtctttgcacaggtgctgtccgtcagaatctgcagtgatcacccctgcgtattccttgtaattaaaatgttctttataataagaaagtcctgttttcagtgcctgtccctttccaaggttttcaggatgcctcaggacaatacagcccatacggcgaagctgcaagaagcaggtgtctgttctgcttccgtcatccaccaccagaatgtgatcaaacccagcgtccagaagctgctggacatagcctggaaaaatatctggcggatccagggcaggaattaaaaccattacttttttcataaatgtgattccttttcttaggagttttggcattccccggttttgtctggctgagaatacctgttaaaatataccacaaatgagtaggtttgcaaatactggattaagaaggaatagaaaaatcttttctccatcttttctctgcatcattttaattccatctgtgctgcatttcgtggcagaaaattaccattcgtgacagaaaagagattttttaaagagtttattgtaaaataaaactataattattttgtttaaagattatcaagaaaggaaagaagagatgaaaatgaaaagaacaaaacgaaacaggctgcttacattgacgctttctgcggcacttatgctgactggggccacaccctttggggcagaggtctatgggcaggatggagatctctttcaggaagagcaggcagcaggtgcgtttcagtcagaggatgtggttgttttagaggaagaaactacccttttttcaggggggggggggggcagaaaatctttcacaaaatgacgatgtagttacgacagttaccacattggatgagttggaacaagctattgaggaaagtacagggagtttggacagtcctgcagttatatccatttcaggtaccatttccattgaccggcgtattaacatattggcgggaaaatatgtaaagcttgtgggggcgtcagaagattccacagatacattgataagagcaagcacctttaccagcggctctccaattgacaatggcgcatactttttttctgttgcaggaggacttacacttgagaatctaacattggacggtggcggaatgccgctgtctggatctgcttcattaatttatgtgaaggggaatggagcttttcttactatcaacaacgacactgttttaaagaataatatggctggggcagtgatggttaatacgaatggttcgaattcaaaagcaccggcaaaggtgaccatgaacggtggtatcattactggcaacaggagttacaatggtcctgggattaattttgctaattatggatgtgcggactttgaaatgaatggggggcagattacagagaaccatgcaaccgggcccgccggagcgatttggagtggagcccaaggaaccatattgatcaatgacggcaaaattacaaataatcaagcagatgggggcgatggaggggctttaaatatatctttatttgcaaaattaattatgaacggcggagagattatcggtaatcagctcactgaaaatagcgggaaaggaggcggtgtttactgtgacggggattttaccatgaatggtgggacgatttccggaaacagtacagcaagcagtgacggtggtaaggggcagaacgtatatctcagcagcggtcattttaccttggcatcggaagctatgatcgcaggcggactgtatatggagctttataataacggcagtgagaaaagcgatacaagctttacgattgcctccaagttatcaaatgatcttgaaatagaaggcttatattcaggccctgaggctgggtgtgttgtggcaagcggaacacaggagtatcttttaacacaggatgatttaaagaagctttcatacgataatagtgaccttcagctttatctggacgaagcaaataatcagattaagcttcggaaaccaatgtacgaaattacttacaatttaactcatgttgaagcgaaagatggtagcggaatagaggcacccagtacagttgaaaaggggaagaccttatatataacactaatacctgactcgggttatcaaatatacccaggaaagcaaaatgattatccaaagttaaatattatgtgtggatcgaaaaaactagtagcacgtcaagcgtatacatataatcccatgaacaataatttagggattgccattgacaaaaattatattaccgataagatagcgattacagttgaagcgactccctatgtcactgagttgaattttctatgtaaagattctatagaaataggggaagaattgcaacttgaagctcaggtgataccagagggaacgttatattccaacgatgatattgactggtatgttggttccgtggaggggatggagataacggatgttgcaatcgttggtaataagttgactgccagccgtgccggtacggtggaggtaatggcaattattgtaaacggaaaggattacaacagtgattttgcaaaaagtttttctattacagtgataaagaagaagggaacggcttccctctcaatgggggactggacatatggggagaaaccgaagtctccagaggtaagttcggacacaaatggagtggacaacgttacttaccgatacacgaaacgtggagaagagaattggaagattgatgtgccaaaagatgcgggagaatatacaatagaggctgtatttggggagacagaggagtatttttcggttacgagaactgctgattttgagattcatcaggcacttctttcccctacagccgatgatcaggatgtgccttatggaagtaacgtgccagttaaaccttatctaaagaatcaaggaggacagaaggtagacttaccttcagcacagtttgagcttagttggtataaggacaaaggatgtacaataccctatgagggagtaaatacagttccctcagaggtcggcacctattatgtcaaaattatctgcacggacctgggagatcccaactacatattagcagaaggagaatctgctgaatataagatccatccggcagtcctttcccccacagtctctaatcggtatgtaacttatggaaataccgtggaagttcagccttatctgaaggatgagcaaggcaacagagtagacctggagtctgcgcagtatgatcttgtgtggtatgaggataaagactgtacgcagctttatgaggatggaatcacggttccttccgctgtcggcacctattatgccaaaattacctatcgagatttaggaaaccctaattatactctgaaagaaggaaaggaatctgcagttgcccgggtaacgatcagctatccctattatcccccggttacaactcctacgcctaccgtgccgcctgtcccggataattatccggagggctcccagtggaagccggatggaagcatagagacaccgggaggaacggtggtccagccggacggcaccattctcctgccggatgagacccggctggagcctggagaaaatggggaaaagccctccatagacaaagagggaactgtgacagatatcaacggcgtaaagatcaaggaggacggaacccttatctttccaggagaagatagagaaagcccagaggatgatatcatcctcacaccaggcagcagcggggagagacctttgtatgacagagaagcagtggaaggggagacccgggaggggagcgtcatccgccgtcccggaaccgccgatgtgactgctccagagggagtgaaggtggatgctatgggaaccctcagctatcccgacgggagtgtctatgacggccaggggaacctggtgcgccccggaaccccggaagcggcagaggatgtgagcatgtggtacgaaaggaataaggtcttcctgaagctgaaagggcaggcacagggagcccagggatatgacttttatctgagcaagagcagccagctcccggatatggaagcatccttcaagatcaacttaaatgaagcggatgaggacacttccttctattttgtgcggcagggaacttattatggctactgccgcgcctggttcagggacgaggacggccggaagcactacagccagtgggggagccttggaaccctggaggtgccccatgacacccccaatgccagcgccataaagtctgtgaaggtaaaggggaaccaggtgacgatccggtttaccaagggagccagggcagagggctttgactgtatgctgggaaggagcctgcgtgtcatcgaccaggagctgcgccctgtgaattatgggaaaaatttaaagaagaattaccacagcaccacagtgaccttcaccaatctggccaaggggacctattatttcggggtgcgtgcctacatcaccaatgaagagaagctgaagatctttggaagatggtcccagcagtcagagctgacaaaaatcacaataaaatagagttgggtaattgggaaacaagttcacaatccgggttcgagtaaggataatttttgtgaaagcaggaaacttggaggtgggtacagaaaatactttctaaacgagggtcaggtgccctgagcatgagataaagtacgtgcaactcctttcaggtggatatggttgattgttattcaatatctcaattttaccataaacctgtgaggagttgttttatggttgaagaaaattgtgaataaaatgtttgagggaaataagaaatgagtaaagtaggaatcatgtcaatgcaacgcattgcgaattacggctcatttttacaggcatatgcactgaaacaacttactcaggaattaggccatgaagtcgaatttgtggattatcatgttggcacaccagtggtaaaagatgatgcggataatggaaataaatatgtacgcaagattgaaaaaggttttgaaacgttccgaaataaagcaccgttttcccataagctggcatatatccaatacaaacagtcttttagaaaaaaatatatgccactgcttggcgttacaaatgaaatgaattttaatccacagttggattgtttgataattggcagcgatgaggtgtttaattgtatccagaaaaatgccagtgttgggtattcaccagaactatttgggaaagacaatcgggcaaaaaagctgattacatatgctgcctcgtttggcaatacaacgatgggaaaaatagagcggtttggaaaaacagaagaaattggaaattatttaaaatcttttgatataatttccgttcgggataaaaattctggagaaattgtagaaaacttgacaggtgggaaagcagtctatcatcttgaccctgttttaatttatgattatatacattgctgcgataagataccgcagattcctgtggcagaaaaatatatgattctgtacgcctattccggcagaatctctgatcgagaggcagactggatttcagtctatgcaaaaaaaaggaaaatgaaagtctatgccattggcgggatacagaaaggtgcggatcgctttattaactgttctccattccaagtactggcatactttcagaatgcacaagaagttattacggatactttccacggcagtattttctctgtgatcacccaccgtccgtttactacatttgttagaaagagtgtggggaatagttatggcaatgaagaaaaattgagcgatctgcttgatcggttaaggctgggaatgcggatgacaacaaaaatagaagatgcagagaggataaatgcgcaatatattaattatacggaagtggatgctatattacagtaccacagaggtgcagcgcaggagtatctgcgaagaaatttataggattaaaaatgttgaacatatggaggattcgagaacattgtgtaggaaagagagaatcaaggctgcacctccagcagagacggttagatttattaaacagaaactggggggggggggggtaaatgataaagttactattatcgtcccagtgtataatgttgcgccctttctaaaaaaatgtattgagtcaatttgcactcagaattatactaatttggagattgttttggtggatgatggctcccaagatgaatctctaaagaaagcattgctggaataacgggaggtgtaggtatgaaaacggtctgcgagctaaataaatgtgttggctgctatgcctgtgctgacatgtgtccaaagaagactgttatagttactgatgaattatcatctttaaatgccattatagatgaaataaattgtattgattgcggaatttgcaaaaaagtttgtcaaataaatcatcctgtgcaaagggtaaagccattgtcgtggtatcaaggctggagtgcagatacatctataagagcaaaaagctcatctggtggagctgcagccgaattgtctagagctgtcattagacaaggcggggttgtttgtagctgtttacttgctaatggaaaatttgagtttgaaattatagagagcattgatgaactaggaaaatttgccggctcaaagtatgttaagagtaatttgaaaggaacacattccaggattcgaaagctgttgaatgaggataaggttgttctatttattggtcttccctgtcaatgtgcggctctcaagaaatctaccgagggcatgagaaaagggacgctttatttagttgatttaatttgtcatggaacaccatctgtaaagctcctggaactatttttggagcaataccatttgtctttatcaaatttcagagatatatcgtttagggtaaaagacaggttttcacttaagttgaataaaaaagtattgttactctaggaacgatggacttttattccattgcgtttatgaattgcttaacttatacagataattgctatgaatgtagatattcggacaccaaccgtgtcgctgatgtcactattggtgattcgtggggttcaaatatttcttcggaggtaagcaaaggaatttcactaataatatgtaataccgaaagagggaaagaactggtaaagcaggcacatctacatctggaggctgtggatattaatagggcaattgcttccaatcgccaactttcccgacctcccattatgccggactcgagagtattcttctttcaagggctggagaaaggcaaaaaatttaattcccttgtgaagaaatgcttgcctaaaaagtgctttagacagtttgttaaaaaatggatgatacgggctcatattatatcggggggtatcacgtatagcgttagtttcactattaagaatagcggtggtgaccggtaaatattgaataaaaactctcttaatcaccagaccactctggcgcaacagtccgtcataaagagataaatgttaactctgcaattgagttacactaactcatgaaaataatgtaaaaattgccgaaagcttatcggagctgctcgctcaggatcggctcctatgctgtgatccaaaaggttctgaacgagtataaacttccacagcttctaagtgtctggtttccgaaagactatggacttcttatggatctggccgcctatctgatcgttaatgaagaaaatgctggtcagtattatccggattttgcatttaaccatcctctttattcggatggaatgtggatctacagtgcttcaaatgtcagccggttcctgcaaggcgtaaaaaaagaacagacgataggcttccttgacgactggaaccgtatacgtgaccataaacaacgcatttatatgtcttatgattcaacaaataaaaactgccaggcaggagatattgatattatcgaatatgggaaacctaaggatgacaaggggcttcctatattcaatttaacactggcttttgacaaaacaaaccgtctgccattgttttatgaagaatatccgggatccattaccgatgtatcccagttcatgtacatggtcgataaggccaaagagtatggatataaaaaagtcggctttatccttgaccgcggatatttgagcaaggacaacatccagtacatggagcattttgtcaatagttttttgaaaaaagtgggggaatttataaaaaagggttcttggaagccgcatagattggggcttagagattccgagagcctattgtatagaaataggggaagaattgcagcttgaatcgatcacctctttcccctacagtctctaatcggtacgtaacttatggaaataccgtggaagttcagccttatctgaaggatgagcaaagcaacagagtagacctggagtgtgtgcagtatgatcttgtgtgatttgtaaaaagcgttttacacaatgacagaccctcatggatctataaatgaatctatttgtctaccatctcatttgcgggcataccaacttcatggttggcagcccgcagcgaaggtgggcttattcattataggaggtcccgcgccatatcttcagttcaataataaaccgttccccaaggtaatcaactaccacatccatacgtcgtgcattccgtgtctcaggctcgatataataatttccggtcccattaattatcggacgaagatagagcaggaaactccaggcggccattacgtataaattgcgatttatcattggaagcggcaataaatatttcactgctttgcgcctcgcttgtagtcaaaaaataattatacaagcgggtttcaaatattcggttggcaatctcaagtgaaccagaatcattttttacaaacccaaacatgatagccatatctattgcagaatcgtcaggattataaacaatcttttttccgccaaataaaatatcgtaaacaacttttttaaggcttggataatcattcagcctgccaataagcgattcaaacagtgtgtttttttcagacaaaagcatccgtattgcttctaaaaacgcctgatgtgtccatgccgatgccttatcaggaaaatccttgcttccggccaccttttcatccagcaatttacaaattcgtgacacaagataaggataccccgaggtatagtcgtaaagcagccctgcaatgtcgtcgatctccattcccgtatgattatcttcttcatactcacaaagcattcttgcgatttcttctttggaaaaactcatcacaacgtcgaaatcagcggcaatattccatgggctgttcatcttatgtgcatcgtcaggcctgatttttctcctgacatttttcacatcatacacaccggctagaatcactgactgaaatgtaggtatcaggtcacgattaatatagtaacctctaagctgagcaagaaaatcaagaaaaacctggttattagtcgcactgtccacttcatctatcattaaaacgattttcttctgggaaatacggcaccatctgctcaaaacccgaaagagattttgcaaagtacaatttttccaatcaccggctgtaaatgtacctaactttgtgcgtatttcttcaggcatcgtatctacatattcaagtaattcatttgaaaatgcttctacaaacatttgctctgtctcaaaggaagcatatccgaacatctgaaaatcgagacgaataatctgatactcaccttttaaataccgttccaaagctctcagggtagttgtctttccgtactgtcgggcccggttgatcgtaaaatatttaccggcatcaaccattgcctttatctgtttgagtttttccgaaatatcaaccatatagtgaagacccggcttgcagtccgcactgacattgaactctttatgcatgctccaatccactcctttctggcgttgatgatgccagatgtgttaaaaggcttccttgctgaaattatcaacttttattttcaataataatcactcaaaaggccgtaaaaaactaactatgaaacctgctatgaaaaagcttatcataaagctgccggacagtcaagaatcgtgatgggaatagtctgaaaattcattgcaattagagaagattgaaacctgcgaggagttgttttattttgacatacggagctgtgaaaaacagaaaattaaaaagacatccattcctttttttgtggaaataaaagggactataggttataattatcttatataatactcatggcttttgcttttatgggataaataataagaaaaggggtggacgtaatgttttttaagtatcagactctgtatatcggtgattccctggaaaaattccaaaccatccgggatatcctggatttaaaagggatcaaatacaaatattccatcattcagcatcaaagacagcgtacccgcaccataatgcctggtataaaggaaaataagctgtatgagatcaaagttcccaaggatgaatttgaacaggcggaatattatatccgttccaaagactgacgaaagcctgtgtcatccaacaagaggcaggtaatagcgttacctgcctcaacacgatcaactttactccttcgtttcatcaaaacctctgtaggctgtctggcatccgagagctcctcttatatgacagggtccattattagtgttgacgggggaaatacacaataattaatttataagcagacagtggcgtatgaaaagactgcagttctcttgatataatagctaaaatctgatataatgaaattagctaaaggaggtgctgttatgtttactgtaaccgctactgcaacagaaatgcagaacaattttggaagatacctaaatcttgttatgtctgggcaggaaatcattgtaacgaaaaatggccgggaagtgggccgttttattcccaaagatgttgctgtgtcctatctgaccgattctttaacaggtgtgctgaaaggaaactatgatcttgatgaagctaaagcagaaaggctgaaggaaaagtatgaagctattgattgatgcaaacattctgcttgatgttcttcaaaaacgtgagccacatgtccaggcttcttcgatcgtgtggaaactgtgtgagacagaaaaagcgaaaggctgtgtttcagcgctgacttttgcaaatttggtctacattatgcgcaaagagatggatccagagaaagttgaggaaaccctgcatgcattatccttgatttttgaatttgtcgatttcagtgcatcggaccttttacgtgccgcagaattaaagtgggatgattttgaggatgctgtgcaaagtgtaactgcccaacggatacgcgctgattttatcattacaagaaatgtaagggattttgccaaaagtaaggtcattgcgtttactccatgcgagctgatcgcaaggatataaaccagcgcaagaacaggaaagagaagccgaggtgttgtgatattcactccggtttttcttttttattgacatgaataatgctataatcaatttataaaaaatttatggagcagagaaaatggcaaagattttgatcatagaagatgatactcatatcaatgagatgactgcacagttcctacgggaaaatggttatgaggcggaccaggccttttccgggacagagggcagactgctgtggagcatgggcagctatgggctgatccttatggatttaatgctccccggactttccggggaggcattgatggaagagatccgcagggtcagccagattcccattattgtgttgtctgcaaaaacagccctcacggataaggtagagctgctaagtcagggggcggatgattatctcaccaagccctttgagctggatgagctgctggcccggattcaggtccagctgcgccatgcgggaatttcaaagggtggaaatcatgcagtctttaaggagtgggagattgacaccgagtccatgtgcctgcgggtgaaaggcgtcccggtggaattgacggcccatgaattccgtattgtggagctgctggcccgcaggcccaagaaggtgtttaccaagcaggaaatttatgagtctgtgtggcagcaggactatgcggtggaggataagaccatcaatgtacatatcagcaacatccgctccaaacttcgggacacaggaacctcagattacatccagaccgtgtggggcattggatttaaaatggcagagtagaaaaacagtctcttttttgcaaaactttactctttcttaaacctttctttgcgctttctgagtttttccatgagatactgagagtatcaaagatgaggaggatatgaaatggaagtgatacgcacgaccgctttgacgaaaacctatgggcggaaaaatgcggtggagaatctggatatgactgtccggcagggagatatttacggatttatcggccgcaacggagcaggaaaatccaccaccctgaaaatgatctgtggtctggccgcccctgcttcaggggaaatccggctttttggagatgactatcgaaatccggtgtccagaagaagagtggggatgctcatagaaagccctgggctttatcccaatttcacagcttacgaaaacatgatgctcaaggctgcctgtttgggaacggtggatgccgggaaaaaggtacgggagctcttggactttgtaggacttaaggacacgggaaaaaagaagacaaaacagtattccatgggaatgaagcaacggctgggaattgcaatggcccttttgggagatccggatctgcttatattggatgagcccattaacgggctggacccagaggggatccagggagtacgccagatgcttcagaagctgaatcaggaaaagggaatcaccatggtgatcagctcccacatgctgggagaattaagcaaggtggccacccactatggaatcatcaaggacggaaaaatggtccgtgaaatttctgcccaggagctggcagaagaatgtaaggattatctggtcatgaaggtggatgagcctaagaaggcggtgacagccctggaagaaatcctgggaatccatgattatgaggttcgtcaaggaggagagatccggatctatgaaggagctgacagtcaggacgtgagccgtatgctggcacagcagggaatcgcggccttggaattttaccggcaccagcaggatttagagggatatttcttggatttgatgggaggtgcggatcatgtttaatttgatgagaatggattttcgcagagccttaaaaagtaaatctgtctatgtgatcctgttgatcctggctgcctgtatgctgatttccgtgatcaccatgaaggctgtcaccagcccggatatggcgaagagcatgtccaatgcaggggtgaccttttcagtgtcaaacgttacggaagaggatcttgaggaattcatgcagatgagtgacctgcaggctttttattccacagcctttcggggcggattctttggagtgatgctctatattatcgctgttcttatgatatgtactgattttcgaagcggttttgcaaagaatatttttgctcttaacagtaaacggtatgggtatgctgtcagtaaatggctgatgcttcaggtgctgtctttggtgagtattgtattgtgctggattttgttccgggtttcctgttccatattctctctgaactatctccacggctccatgtcagatttcttgaagatggcaggatacatctggattgtacagggggcttttaatgcccaggccatagccctttccctgtggaccagaagtgagggaatgggtattgccggcgggattgtcatgccgggaggacttgtggtcatgctccttgagacatttttgggcctgttccatatttctattatagactataccctctatgggtgtatgaactccctgagctttcccatcagcctgacaggcacagggcgggccctggccacagcgcttctatggacagtgatctggatggcggcggcagtggcggctgttcagaaaaaagatgtttagattcaatttagaacaggagtaggaaagagagatggcaggtatgatggcggtgatttttgcaggaatttcagttgtgctggccgtgcagcttgtgcgggtgtaccagcaggtgaaggagtggagtcagttgattcagggcacggagcctggcagtaatctgcgtctgggctgcagtgtgcgttcaaaagctttccagaacttctgcagacagatgaaccggcggctggaggagcagcagaggagccgccttgaaacggaaaaatccgcccaagagctgaaatacaccatatcctgcgtctctcatgatatccgcacccctctcacaggagccctgggttatctggagcttgcccgtggcagcggggagcccaagaagatccagagctacttggagattgttttgtccaggctgaaggagctggagaatcttttggaggagctttttctatacagtaagatggcaaatgtggaatttgaactggagaccacacaggtttgtgtatatcctgttctctgccaggtgctggcaggtttttatggccagctcacacaggcggggatggagcccaggcttacctttgagcaggaaaatgtgaaggtcacaggggagccagaggccatgcggcggatcttcggcaatctgatcaacaatgccctggtccatggaagccagtatctggacatccgccagcaggggaaggtgatcatcttctccaatcaggtggagcatcccgaaagagtggactgcagccggttgtttgaccggttttataaggcagacacagcccggcacagaaccagctctgggctgggtctgtctattgtgcgtcagctcatggaaaaaatgggaggctgcgtccaggccagtgtggatggaaacaaactgtctatcaaatgcatatttgatacagcagaaaaaaagcaggaaatacaagagtagaaataataggaaagttcagacagatgcggtcatattggtggccgcatttcttattacatatttgttctactttgcaaacaaaagatatcaatatccataaagaaaaggtcaaatataggaataggaattcctatttccataatctatactaagattaagaaagattggatatgttttcaaggatgccccggacggtgtgggaatcaccgtgacccagccggcgcctttgacgaggcttaatcattcgagatacaaaaatactgccatgatgcttgacatggcagtattttttccatacagtaaaggtagtaagatctggctggtcaacaggcagcttgaagctaacggaacatacaagggaggaagcacagtgggcatacaggaaaaggactggggatgcattgaatggatggacaacggggaggaagggctttttcaaaagggattgaacgtggggatcgtcacattaaagacaggcgcccatcagccagcccatattcattatgaggaacaagtgatctatgtgatacagggccaggccatctctttgatcaatggagagaagacaagtctcagggcgggaaaattctttcggtggccggagggtgtgacccatgagattttcaacattggaaatattcccttccagcatctgctcatatccaatccttccgggattgatctggacagtcttttagaggagcgcaaggtcacccagaagctgacggtgaaggaaatcgaggatttgctgtatgtggctgtggaggcagtgcgcacccagtttttggaaactctccactatgcctatgccatatttgacaggaatggaaatgtggtgacacagagcagctaccgcacacaattctgccaggacaattgcgtggaccagaaggacgggtgctatgcctgcatggtgaagggcgcggaccggaaggatgaagaggagcggaccatggtatgtccaaaggggatgacgatcttctgtattcccatttattttggaggaaattttctgggacatattcagggcggatacatttatcaatcccaaaactccaagcctaccctgccgggggtgtatgataccccggagagctctgccatcggaatccgcaatcttctgcggaaaattgccaaggctatccgcaattattgtgaattcgaggaatttcgaagagagctcacagccagggatctgaccatcaacaattccagggaaaaacagcggatccttatgacaaatctgaaaaaggcagagtatgcggtcacggacctgaagatcaataaccatttcctgtttaataccctgaacagtatggcctccatggcactggacgggggacagatggccctgtaccaatccattgtggatctgtcaaaaatgtttcattataccctgcagaaccaggatactattgtacctttaaaaaaagaaatagaatttctcagggcctatcttcagcttcagaagctgcgttatggggagaatctccatgtaacagacaactggacacaggattttggtgagtgtcccgtgccttttcactttctgcagcccattgtggaaaatgcctttgtccacggattttcccaggaggaggacaaatatctgaatttggattttcagcggatggacaagcagattcagatcacggtaataaattctggaaaaaagctggatgaggaggcctgccgggtgatcaacaaggctatgaaaagcaagacctcccatggaatttccatgatctatcataagctgtcctgtgtgtacggcagggaatttgacttttatgccagggcacaggacagggagggaagctgttttgtaataaaaatacctgcctggatggaaaaaggaagggagtattgatgatacgagcagtgatctgcgatgatgaaaaagcggcgggaaacattatccgccactttattgaagaagagaagcttcccattgaaattgtggggactgccgtgaatggtaagcaggcgttggagcttcttcgcagggaaaggccggatctggcctttatggacatccacatgcctttcctgaatggctttgaggtgatcagccaggcaccggagacgaaatttatcattgtcactgcctacgattcctttgactatgcccagaaggcgctccgtctgggggcctgtgacattatctcaaagcccattgagttccggcagcttcgggaggctgtcacccgggccgtgggctggaattttacggccaatgacaccgtgaataagatgctctggtatatccataaccactatacagaaaacattaccctggaaagtctgatggacattacctactgtacaaaaagtcacatttccagactttttaaaaaatatatgggggtttccatcttgaactatatccatggactgcgcattgaaaaggcagcggcttatttaaaggaaggaactcttgggatccaggaaatttcccagaaggtgggctaccagaatctgaataacttttataaatattttaaacagcagaaaggagagacaccggctgtattcctgcagaactggaaggccggaaggtaacgaatatggaaaaagaaagaatggaaaagcttatagaaaacagtcctctgcttcagaaggtagcagccggcaaggaggccgtgtgggtgaatccggacaaaaccacctttgaggaggctatggaaaacagtgagctcaccttaaaggatgtggatgatgcccaggagcgtctcagccgttttgccccctttattatgaaatgcttccctgagacagctcccaggcagggactgatcgaatctgccctgaccccaattccccatatgcaggaacgactcaacgaaaagtacggggcaggactaaagggcaggcttcttctgaagcaggacagccacctggccatcgcaggctctatcaaggcccggggagggatttatgaggtgcttaagcacacggaggagctggcattggagcacggacttctcactcttaaggattcctatgaaaaactggcccaggatacctgcagagagttcttcagcaagtacaccattcaggtagggtccacgggaaatctggggatgagcatcgggatcatgagtgcggccattgggtatcaggtgatcgtacatatgtccgcagatgccaagcagtggaaaaaggatcttctcaggagccggggagtgacagtgatggagtatgagtccgactacagcatggctgtggagaatggcagaagactttccgacgctaatcccatgagctattttgtggatgatgaaaattcccggaatctgttcctgggttatgccgttgcagccaagcggctggtggaccagctgaaggaacagggaatccttgtggacccggagcatccgctgtttacttatattccctgcggcgtgggaggcgcaccaggcggggtgagctttggactcaaacaaatgttccgggatcaagtccattgcttcttcgtggagcccacccaggctccctgtatgctggcaggcatggcaaccgggaaaaacagtgaaatctccgtccaggatctgggcctgtctggcctgacccatgcagacggtctggcggtgggacgcccctccgggtttgtgggaggggtgatgaagcccatgctcagcggagaatttaccgtggaagataagaagctctatgattacatgagggacctgctggatacagaggacatttttctggagcccagtgcctgcgctgccttccagggcccggtgatgctcatgcaaagccaggagaccagagcctatctggaaaaggagggactcctggataaaatgtctggggcggctcacattgcctgggccaccggaggaagcctggtacctgaaaaaatcagggaggaatataaaaacacctatttggactaagattctgccttcagtctctgggtgacagaatcctttttcagggagctgcagatccccaggctcaccagaagctgaagtcctatcaaaatgccagagaacagcaccataggcaaaaaggtcatcttgaaaagaatgaatttaaaggacatcacctcattggccagataacacagcagccatccaatgcctgcgccacacagggcggataggatggaggatttcaggctgatgtacaggccttcccggtagagcattttctgaagctggcggctggtcatgcccacggcctggaggagggcaaattctctctttcggataatggcgctgttgatgagcatattgatcatattcagaagcccgaagaccagaataaaagcggatactccgtacaaactgttcatagtcacctggataaagccctccagcatggaggcttcctcagagcgtattcttaaggtcaggttggggcggccgctgatgagagcttggagatggttcttcacagcctctctttggttttcttcacataggatagacaggtgggtggtgttttccaggggggagatctcctggatggcctcaggtgtcatatagaaaagacctgtggacgggaagtaggcgattcccaccacatgaaaggttttttcaagggtctggccatcggtgtgaaattgaaagaccatggtgtctcctgtctgaatctctttataattgtaatcgctgcggtctgtgcggtatttgttgatgacaatgcctgaggtacccatgtcttcataagaaatgcttccgctcaccacctggcttacgttacttagaagctgtggggatacactttcgatcaattcctggttatcttttggatcgtcataattaatagctggctggattaaatttccgatggcacattcatctttaataatctcctgaaccccgggaatggcagaaatttctttctgaagctcctgggacaggggattattttttatgatctgaggaaagcgctcataaaaattatccatctgtattccaatctggaagtcctcctccaaaggataggtctgcagcagcatggcaggcagattgatggaggccagtaaaatggccagggcgatcatcaaggtgccgctgatgctcaaagagagaatggacatacggttttttctgctgtttacagacagattattttttgccagggtcctgggggtgatgtgattcaattccttatgtgctctgggggcacggccgttggtgtatttcatggcctccgtgggggacacctgggagagcagctttgcaggctttcttaaggccgctttgatcaccacaaagatcagcagtccgcagagaaggatcacacaaagatcataggcgatccagcggatccctgagattgccccggtgaggaccagggaaaggagcatgcccagagggataaaacgcagggccagaacatttccctgtatatttaaaagacggcagagctgccggtgtgtggtgccaagagacatcatctgggcatacatgggcatggcgttcacaaccgaaatataaaaaatactgtagatcacaaagctgctggcaaacataaggaaaagggcgaagagcacgattccggccagaagagttccatctaactgaaagccgtctatatataccgtgttcaaaaggatatcgtaattttttacacccagctcaagtccctttttcgttaagaaatctttttgtgcctgtggactttccacgcttttttccttgttcagcaggagcagggcgtccacggtggcgggagtctgggtgctgaattcagagactggcagatgttgggtccgggccacgtagctgctacggaactggtcagatacgatgacatagaactgaccggctttttcctggggggtattttttacaatggcacacagggtgaagctttgggtggcgggctggtttgtgaaggcatccttgtaggaaaaatccaaggtgtctcccacagaaagtccgtgtaggtcacagtaggttttggaaagggccgcctccttttcctgtgctggcggcttcccttccagaagctggaagcccagcaaagacagagccggctggtccatataggccagatccgtggtaccctggtcatctgtgatcccgccaaattttttatagatccccacagtgtcaaaggcgggatcctcccgaaggcggctttccatggagctgtccagggcctggtacatggcatggtagggactgctgttggaacgggtcagggtgtcattgatgagcacattgaatacaactgccataaggcacagggcaattacaatgatgactgctgacagggtagttttcagcctgtgatttttcaggtccgcctttgccaggtgctttaagatccgtgagttattgtttccgaatattaaatccgtcatttctgtgccctcctgactttgtgtccggtattggtgcagccttggtattttaaggcacccttgtttttagactttatcatactcataataaataccatcctttctttcgatggcttcattgtaaagtacaaacctcgctgaattgtcaccgctaagtggggcggattcccggaaatatagcaatccggtgacaatttattgatagggcaggaatacggaaaatgtagaaccttcaccgggatgggaggaaaccttgatatatcccccctgcatggtgatgatttccctggacaggtacagcccaatcccgatgccctcacagtcatggacgtccccttcccggtaaaaccgctgaaagatcgcgccttggtgctcctcagggatgccctttccagtgtcggagatgtcaattttcacatacatctcccagggctgtacctgcacatggatgctgccgtctttgggtgtatatttcactgcattgtctaaaatattgaacaaggcctccccagtccattttgcgtcatgggataagaaaagatcctccgggcaggagacctggacaaaaatgtgcttgtcctcagcttttaggagcacgcctcccagggcggctgccagggtattgtagatggggccgggctttttcttcaaagcgatgatacctgtctcaagacgggaggtcttcaccatggctgccataagaaactccagcttgtccacctgaccggccatggccataagaaattcctgctgctttttcaaaggaacggattgttccagcaaggtggtggtgataatttttaggttggcgatgggggtttttacctggtgggagatatcggagatcagtgtctgtagctctgcctgttctttggcaatggtccggcggttctgcaccataatttggtagagccggaccagacggtggttgatcttgtaaaagagagtttcttcctgggcaatcttcggtgtctccatttcaccggacagcatgttgtccagaagcgtgcacagccggttggtaaagccagtgagcttttgccgtacaaggtacaacagaacagcggtacaggaaagaagcagaaggctgaaaacaaggcacaggcagagaaccagcgggctgtgggtgaggacatacagggcggcctccagagatacagttgccacaagccagaaggcggcggctcctatgcaggctttgttcatggaaagtctttcatctgtcatcgttcacttcctccaatccacatataacccatgccgtagacagtcttaatatactgaacggaggttttctcgatcttgctgcggacacggctgatggctgaggtgagggcatgttcatccacaaaattttcatcgctgtcccacagcttttccagaaggacctggcgggttaatacgatcttggggtttttggtgaacacgtttaaaagccggtattccatgggggtgaaggaaatcccttccccatccagagaggcggtcatctgggaaaaatgaatgaacagatggtcgtccttatagcagtctcctcctgtctgccgctggatgcgggacaaaagggcagcggtctttttccggaacacgctgatgggaaagggttttgtcacatagtcatctgcacccagctcatatccccggagcatgtcactttccatgtcattggcagtgagaaagatcacggcagtgtccggccgccgtgccttcacctcccggcagagatcaaagccatttccgtcaggaagattcacatccagaacaatgagatcgtaggtttgcttgttaaagagctttaaggcctctgtcttcgtcagggcagaatcaatttcatagcctgtcccggacagattgtagcacaaggtattatttaaaaggcggtcatcctccaccactagaattctcatacagtcacatcctttcacctataggataccacagaaatgtcatagaaacctcacagaaaaacggattttaaatttttcgtggctttctccctgatggaggatattcaatttaccattcattcgattccaacaattttctgggctctttttctggcggccaggtacacggccagcatgacggcaagaatgacagcggtaattccaaggagggtgcccagtgtatagagttcgttgacggtgatcctgcggtcattaaagaagctcacactcagggaaaagagaaatcccaggctgcagcctatgatcacagggtactggaagattttgtccatttgttttttcagcaccttctgctggtaccccttgtcagctccaagccgctccaggttctggaacagctcctgattgtcagaggccatggaaatgctgcgcacatagctcataatggcaatggccgtgagacagataatgaaaatatacaggcacagcatcacatacacacagatgagctgtagaaaatcctgactgctcacaatcaggaagacaggagcataattccagtcgtccaggagcatggagtcatccatggaaagagaaatggtctctccataagaatagggcactccccggctggctgccagcttatcctcccacagatcatacaggcccatatgtctggacagaacagtggtatgctccacatactgggccaggagatctttggcgaagtcataggatgcctcataatcatccacattaaaggagatgagctgctccttatataacgcatccaatccctgggccatggaagcatagtcctggtcattaagcacataggtataagggttgctaagatcgcttaaggtgtcaaattctaccgtccccccaaaggttacaggcagtgtctgcctggtatccgggttggtcacactggacaggccgtccacaaagttccagatgttttctttataatctgtgggagtgatggttttgtaggtgccaggctccacgtccagcttcttgccgctgagagtttcaaaggcccgggcacaaagaaataacgcagaggactcctgttcagaagttatccgcacaaattcatttttgtcattgatatccatgcgatcataggtgatcaccaggtttattccttcctcctccccgtagtcggttacttccaggtgatagttttcggcagtgcctaaaatatcttctttggttatttgcttttccttagcaggagagtgcatggtaaactgccgggtgttttctcccggggtccggttgttggaatctgtataaagcataccgaaaaaggcggcaaacagacaggagaacaaaagaagtacaatcacacacatgctcctggccgcggattttgcagtaaaccgcatgaggctgatggaaaccaggtttttataaaatttgtctttgttcttccgcagccggttctgagagaccagactgaggatgatcaggtagattcccaccagagccagcagatagaaaaggttggtgtaggagggcagggaatagtgaaagacataggcagatatggagggaaggccgattcccagaaacagccccaaaagggtgagggccactcccacagggaaggtccagggcttaatttcttttaccatttcggatttgtgctgggtcttgagaatatccataatatccgagcggttcacaaaccgtctgcctgccagccccagaagaaaggccagtaccagggaaaaaccggctcctgccaaaaagccttcaatgcctgcctggtacttcatctcattggtggagatgagaaaggcttcaaaaattttccacaccaggaaggaggcaggccctgccagaagcagtcccaggacagaggatgcggcgcacaccagagccagctccttaaaaagtatggctttcaggcgcttcttagattcccccagggccagaaagattccgtattcccggcttttgtaccggaaaaataaggtggaggcatagaccgtgaagatggagcagcccacagcagtgacagccataagaaggccagccattttcctggtgtctcctccctggggcagaaagttctgtaccgtggggccaaaatacatcacgcaaaaagaagaaattaaaagcacggagaggaaaatgcagaagcccagcaagacatactgccccaggttccttttccgaagcttggaaaaaattttattgatggtcattgtcatcgcctcccaattctcttaaagtatccagcagctgatccataaattcccggcggccgccagtacgggtgatttcattataaatacagccgtccttcagtacgatcacccggtcgcagaaggaggcggcaaagctgtcgtgggttaccatgaagactgtggcctgcatctgctccctggcttgaagaaaggcatcgattacagccttgcaggatttgctgtccaggtttccggtgggttcgtccgcgagaatgatgtagggctggttcataagcgaacgggcaacagccgtgcgctgtttctcgcccccggaaatctctgcgggatatttcttgcggatcttgtcaatcccgaaaagcccacacagcttagaggccttggcctccatggatgcaatgggttttccggcaatgatctgaggcaggcagatattttcaaatactgtgaggccgtccagaagcatgaaatcctggaatacaaaacccagattttcgtttcttattttggccagcgcctgctgggaaagtccggaaagattttttttgttgagaagaatctgtccgccgtcatgggggatgaagcaggagatgcagttgagcagtgtggttttcccgctgccagacggccccatgacggccacaaattctcctttttctatttcaaaggatacgtcctttaaaacgggataggtgttgggtcctgtttgataggatttgtttaaatgattgacctgaagcatatgtgaatcctccttttaaaatgcggcacttgttgtttgttgtgcatttgttttaatagcttaattgtatcggaagggcagaaatttttgtacggcttcaaagggtaagtttgacacagatttgggtaagtttggtggtttctggtggatgaaagccggcaaatgtgttaaagtaagtgagagattggccgtgaaagaccaaaatgtccatgaagggcagaaatacaggctggtaaggcttttcagggattttcacgccatggaaacaagaaagatcaggagtgcacagcaatgcgaatcggaatctgtgatgatgagaaaagacagcgaagccagttgagaaggactgtggaaagggaactgcagctcaagggaatggactatgaaattttagagttttcatccggagaggagctcatggcgggcctgaaggaaaaggagccggaaattctgttcctggatattgaaatggacgggataaatggaatggacacagccagagccttgagaaaccaaggcagggatatggtgatcatttttgtcaccgcctacccggattttgttttccagggatatgaggtccatgcccttcattatcttttaaagccctgccaggaggagaagatcaaagaagtgctggaaatggccttacaggagaagcaggtcaagaccagccaatactatctggtagagcagaaatcaggaaccctgcggctgcctctgaaggatgtgtgctattttaaaagtgacagaaaaatggtggaggcagttcttttagacagaagagagaccttctatgcaaagctggcggatgtggaggaggagctgccagagtatttcgtgcgcatccacaaccgttatgtggtaaatctcaatcatgtgtccagggtggaggggacctgctgtatctgtgcacaggaggagcttccggtgagcagggcccacaaacagaagctgtccgtggcctttgccaggctggtgctggggtaggaggaagagaacgtgctgagactgttaaaccttattggaactttattgatctttttgcagggctttttgctccttcagatcctgtctggactgatgaagagaagagaaaagatccttctggtgatcctgggctggtttttgctgtcctgtgtggtgacatctgccatctatccacaggatccagtgaacatttccctgattctgcccttgtttttggcggcgatcggtctgatctttgagggaagctggcttgtgaaaatttcatcggtgatgatcttttatcccatcatcatgtccttgaattttctttataatgatatttttgaaacactgttttttagttttacagacggctcatacaagctgaatattactttatctaatttaagcattttggtaccagtggtgttttggtatcttttctggagatataccaaggactggctgaaaaatatctacaacctgctggacagaaaatcctggatcatgctggatgtgatctgtgtggcttcctttaccgctgttttttcttttatttattttacgccggaggaaacctataaggtgtatgcagggcttgccgcctgtatggtgaccaatattggaagtatctggctggcctcttacctggcagacagtgtccatgcagaaatggagagaaagaatctcaggcttttgcaggattattaccgggagctggagaagaaccagcaggagatccgaaggttccgtcatgatatgaaaaaccattttgctacagtgggagggctgctcacagaaggaaagctggaggaggcaaagtcatatttcacccagctgggcggccatatggaggccaggaacagacagttttgtaagaacagcattgtaaacgcagttcttaacgccaagtacaatgaggcccaggaggcggggatcgactgcttctttcatattggaattgaggggatgctggatatggatgatgtgagtctgtgtaccatatttgccaataccctggacaatgccattgaggcctgtgtgaagatcaaggagccgcagaaacggcggctgtctgtgaaggcaagatttgttccaaatggaaattttacttatgaaattgtgaattccaagaataatcccataaaagagaaaaaagggaggattcttacggacaaggaggatgagaagtcccatggtctgggactggcctcagtaagagaaattgtggaaaaatatgggggcagcatggaggtgtcctatacccaggaggaattccgggtagtgctcctggtgtaaacggcaaagagaacgaataaaagtaatgtgactatataagataaaatgagggctttgggatgacaaaggaatccatggaaaaatatttgtatgaagctatgacaattggggaacagctgctgatcagcggcgcggaggtgagccgggtggaggataccatcaggcgtatttgtatggcttatggggcacagcgggtggatgtgttttccattaccaccatcattgtgaccacagtgtatggtccggaattcggaacctgtacccagacccgcaggatcaatggactgagcacggatctaaataagatctccctgctaaacgatctgtccaggaaaatctgtgccacctgtatggaggcagaaaaggtggaacaggagattcagaagatcctggagggacccaggtattcctttctcacccagctttttatctatgccttgatctcaggaaccttttccatatttttcgggggaacggtgaaggatatggtggcctctgcctgtatcggtgtgcttttaaaggtgggggaatccctgctgagaggctggcggctgaacccctttctggtggcttttttatgctcctgcctgggtggtattctggccaacggggcggttgccacagggctgggaagttatgtggataaaatcagtattgggaatattatgctgctcataccgggaattcccttcaccaattccctgcgtgacatgttttccggtgatatgatcaccggactggtgaagtttacagagtctgtcctgctggccatgaccattgccacaggatttgcctggatgaatctgctgttttagaggaggaagaaggatgaaggaatgtatccagctggcagcgggctgccttggctctttggggttttccatgctttttaatatacgggggaggaatcttctgtgggcgtccctgggaggtctggtggactgggggacctacctggcagcggcttatttgtggcacaatgattttgtgagctgttttgccgcctcggtggtggtgaccatctatgcagagtgtatggccagaaggcagaagacgccggtgacggtgtttctggtggcggccctgatcccccttattcccggaggggccctttaccgcaccatgggaaatgcggtgaacaaaaactgggcggcctttttccaggaggggggttataccctgatctttgccctgtgcattgcagtggggatcatctgtgccaccgtggtcttccagatgatctggatgatcctgcgaagggagagaaaatcctagagttcaggacttttgagaatccggcagcagagcggccagtgcctggcagccaggaacgaagcgctgggcaggcatggaggagcaggacaggatcacctccacatgggccgcatccgcctgcaggaggctcaccttgatgccttttttcctggccttggaaaggaaatcgtctccacccccttggtagggcagggaaagcaccaggctggttcccgaatcccccactcgtatgggggcagacgcaccgaagaccaggcccacggcctgaatgagtttcttcagcttttctccgtacagccggcgcagacgacgggtctgggacaacaggtgtccatcccggatgaactgacacagggcgatctgctctgccttggaggcagtctggttgtaggcgggagctacctgctgatatttttgcgacagatccgggggaaggaccatgaagctgatccttatggatggcagcagaaggcgggagaaggaacccacatagatgatattttttcctcctgacagactatgaagggagggagtgggcttctgcaggtacacaaattcgttctcaaaatcgtcttcaatgatcagacttccctgaagggccgcatggcgcaccagctccagccgcctggacacaggcatgatctcaccccatttggtcatgtgggcaggagacacatagatgatgtcacaatttttgtcacggtaatggatctcaaagccgtgatcctgaaagacggtggatccctgaaggaaagagactgtggggaaggacacggtctttttttcttttaaaagagggcacagaatatggaggaggctttgtacgccagcccccactacaatgtcatcaggggaacaaaccacgttgcgccgctcccggatatagtcacacagagcctggcggaaatccgcctccccttggggttctccgtagctgagcaggcgttcgtcctgtctaagggcgctcttaatataccgtcgccacacatcaaaatgaaagctctctctgtccacgccagaggtggcaaaattaaacaccaccggtgtctctgccttggggggatggggcctgacggcctggtttttggctatctcagtgacataatagccgctttggggtttggagatgagatatccgtctgcggccagctgaagataggcagactctgcggttgtgcggctgatgcccagctcctgggagcagcgtctcagggaaggcattttcgttccgggggatagtttctgagataaaatttgttctctgtaatgttcataaacctgaagatacaggtgttctttctgactttctgtctgtaaatgcatactgcacctcgtatgaaattttgtaattaggtattttcaattactggctttggtggtattctaaatcaaaatagtattttatgcaagtggtaacatggatgcggtacaggaggtgcatagcttatgaaaaatatgaaacgaattgctgtgatcaacgatctatccgggctgggcaagtgctctttgacagcggccattccggtgatctctgccatgggggcgcaggcatgccctatgcccacggctgtattaagcaatcagaccgggtttgacagttatacctgccaggatctcaccggaggtctggatgcttatatggatgagtggaagaagcggaattttcatcctgacggcatctactgtgggtttatggccagcagtgcccaggcggacaagattttgaaatttattcaaatgttccgccgggagggaaccaaggtactggtagaccctattatgggagacaatggaaggccctttcccttctatgatgaaaatctggggaggaagctgcggatgcttttaaaggaggcggatgtgatcacccccaatcttactgaggcggtgatgcttacagagagcgtgtcagcgcctattaaaagctatgccgtagtttttgaagagaagaagatgggcaaggattatctgcggactgtggaaagcatagggaagacacttatagagaagtatcacctggagacagtgatcattacagggatcaacttctataatgaagaaaagggctttatggaaatgggaaacctggtcgtaggcagtgagggtgtgcactgggttttcgcaccaaaacacggtggaagctattctggaaccggagatctgtttgcagcagtcctaagcgtgggaatggccaagggcaagcctctggcccggtatgtagaaaaggctgtgcattttctggaggtttccatccgggatgcggctgctgcaggctgtgacagaaatgaaggcgtatgctttgaacgttatcttcacaccttgtgggaagaataaaaggagttcgaaagccccgggtaagaataaaaggacaagtctcattcacaagagctcttgtcctttttctattggcgcacatcccaggaaagcagccagcggctgtgatgggagtatcacatcagagagccttttttacatgctccacaaacaggcggcggatgccttcatattctccaaggcccttgagcacaggctttacacaatagccggcattttggaactggcacatccaggaatccgggtcatctccggccatgtcatttctggcatggtccccggcaacgatcataaagggggccaggatcactttttccggagaaaaatccttcaccatgcgaaggagggtctccatggaaggataggcctccacagttcccaggaagatattgggatggcccttatctttgaacagataatccagggcagcatagatggcgttggcataatgggtggtgccgtgtcccatcaaaaccagggcgtcccgggggcttaagtcctgaaattcctgggcgatggcctgaaccacggccacattgtccgcctctgaggtgagaagaggggtgccgaaggcgatggtgtgaaaggaagcctcataggccagggcgtcctccttcatgagatcattttcgatcccgttgatcacatgggtgggctggacgatcacatctgtgattttgtcggcagccatctgctccatggcctctctcacagtattgatcttcacgtgatctctgctaagaagttttcggatgatcatcttgctggtccaggcccggtatacctggtgctcagggaattcccgggcaatgtcctgttcgatggcgtctatggttacttctctggtgggattgtagctggtaccgaagcttaccactaaaattgctttttttctttggttttccattggaatgtttcctccgtggtagattctttcggatagatttccgatatattcctccagttctcccaaggtgcggggaacgggcagtgtggttttcaaaattcccttttgacagagccggtgaaagagttcaaggacagcaggctgctttaagttggtctgcctcagggcgcctttgttggcaaagacctctgtgggcgagccgtggagaaagacccttccctcgttgaaaataaagacctcatctgcccactggtaggcataatccacatcgtgggtggccatcatcactgtgatcccctgggcagtgagctgctccacaattttatttaccataagggtatgtctggggtccagggcagcggcaggttcgtccagaatgatcacctctgggtgcatcaccaggatatccgcaatggacacctgctttttctggccgccgctgagggcatgggtgggcttgtggcggaagggggtgatctccaggtagtcgatgacctgctccacctctttttgtgcctgctcctttgatacgcccagattcaggataccgaaggaaatctcctggtatacactggcagaaaaaagctgattgtccgggtcctgaaagacaatgcccaccttctggcgcacctccagcagcccctttctggaataatcgtagggttttccgtgaagatacatggtgcccttctcaggctgaagcacaccattgcagcacaaaaagaaggtggattttccggagccgttggcgcccatgaaggcaatcttcctgcctttttttatttccagggacaggccgttgagggagtggctgcttccgtcatcataggaataatataggtcctctgcctttaaaataatgtcattcatacaaaaaaattcctccatatggcaaatgaatataagaagatctcaaagatcaccaaacgtacaatgtgctttttctccggcggcctgctctcgcttaaaacccggatggttccgtcatagcaccgggactccatggcatcatagagcacattggattttttcatggcccggatgaaaagggcggatgccaaagccccgaaggatttcagggaggtgcgaaagctcctattccccagtcttgatttctgggaaatggaaatggcggaggaaatctccagcaagacaaaaataaaacggtagatcaaaagcatgagctcaatgagcatcctgggacagtgcagctttcccagcacctccagaatatccggcataggggtgttgaaggagagaaaatacaggcaggacaccgccgccagggctgtgaggatcagctgcagggcatacagcaggtcctttttgtttactgccagataggaaccacccaggggaatggaaagaaggtccccgccctggggtgagaaattaaaaataatggccagggtgctcaacagcaaaaaggtgagggggaccagaagaaaatgacgataacggaaaaaagggattccccccttgtaaacagtgagaatccccataactgccagtaccaaaagcgccactgcaatggaacggcttcccacacaggctatgagagtgagcattgcaaaagcgaatttttctcctgggttcacgtatctgagcctggactgatagcacagcttatctatggtaatcatcgcgcgctccttttggcaattatttattcaccttttcctaatttctttctctccacaaagcgtcccatgaagaagcacagaacacctacgccgatactggactggaggcagaagagaagactttccacctcgccgggcagctcggagcccagcagcttttcaaatacaggggtggcccaggcttcatagcccttgtccacttcttctactacctggcttcccgcatcatcggaaccgccgaaatctgcccccttcagggcaaagagcggaacaaaggcgatgaggaaaatagcaaggatcattgcaaatacagtactttttttcatctttatttggcctcctttataaatccgatggcccgaagctcgggttttgcgtaggtttccagggcagctacgatcagtacggtgatcagtccttcaatgacagccagagggatctgggtgggtgcaaacacaaccaggaatttgcccatggcggcagggatggtggtggaggagtgatgggccagcgccatctgaaccgctgtcacgcagtaggtaaacaaatcccctatggctgcggccaggaagattcccacctttttgttcatattggtttttttgcacagcatatagatgccgtaggatacaaaggggcctgcaatggccatggaaaaggtgttggctcccagggtggtcagtcccccatgtgccagcaaaatcgcctggaacaccagaacgatcagtcccaggatgctcactgccgcaggtccgaacaggatcgcccccagcccggttccggtcatgtgggaacagcttcctgtcacagagggaatcttcagggatgagatcacaaagatgaaagctccggccattgccagaatgggaagggacttaggcgctgcactcagacgcttcctgatggcgaaaaagcctgccgccagaaagggaaggcagataagaccccaggcaatgcagtaggctccaggcaggtagccctccataatgtgcatggcgcttacattgggcacgatgccgaagcacagggccagtgctgcagtggcggcgataaggtgtttttgtttttttgtcatgtttcgtttctcctctccagaatttggtgtttcctgcctcgtttatattccgaggccataaatttagagcgttttgaacgaaaaaatacccgccggatcattctggcgggcaggagggaaagtacccatttcgggcattcctctgcaccaagccatcgttcgtaacaggtgcatcaacaaatataaggcagttcttctggctcagggatcctcattcttttccgccttcccagatgttactccagtgacatatttgaaaaagaactcctccattacagcggcgcgaccgcgcaggactttcactctgcttttctattaatccatagtggaaccttatatcttcgatttaaaattaattatatccttagaaacagccaatgtcaatgaagtttcgccagggaaagggggaaattgtcaatggaacccgctgttcatcacaacatgggggcaaggggaagattttgtcgagagagaattgacattgcagccgggaatgattatgatggtagggacagcgagaacaaaggagcggaagtactatgagcattaccatgattggaattgaccataacaaggccccggtggatatccgggccctgttttcctttacaaagaaaaatgcaggggaggccatggaaaagctgaaggaggacacaggtatcttaggatgtatcattttgtccacctgcaaccgtctggaggtgtgggccagtgtggaggatgagcaggaagtgtctctctatgacggacttagcgccctgaaaggaatccaggagccttcttatgaaaaggaatattttgtacaccgccagggggcagaggcggttgagcatctgttctatcttaccagcgggctgaagtcccagattttaggggaggatcagatcctcacccaggtaaaggacgccttgtctctggccagggagcattataccacagacggggtgctggaggtgcttttccgcatggcagtgaccgcgggaaagaagatcaagacagaggtgcctttctcccacggaaatccttcggtgatccaccaggccgtccagtatttacaggagcacgggtattctgtggcgggaaagacctgtatggtcattggaaatggggagatgggaaaggtggctgcccagaccctgcgggaatttggagcggacgtgactgtgaccatccgtcaatacagaagcggtgtggtgaatattccccttgggtgcaggcgtattaattatggggagcggatggagtttctccccaagtgtgacatggtggtgagcgccacggccagccccaattacacgttgcgggaggagctttttgaacaggtgaagctggacgggcatctgatcttgatcgacctggcagttcccagggatattgagccttccctgggaaaaaggccggggatcaccctctatgacatggacagcttccgcatggacggcacaccccaggagcttcaggagaatctggaggcagccggtgccattgtaaaggcacagatgaaggaatttggggactggtactgtggaagggacatcattcccagaattcaggatatccgggaagaggctgttcaggatttaaatgtgcgcatagaaaaaatattaaaaaatacgcccatggaggacagcgacagggaaaagcttttgaaaaccattgatactgcggcaggcaaggtggtaaacaaaatgatgttcggcctgaaggattttctcaatgatgaagctttccgggagtgtgtggcaggactggagaaattatatgaaaactaaaagatactttcctctgttcgtagatctggaggaaaagcggatcgtggtggcgggggctggaaaggttgccacccggagaatacgcacattgtcccagtttacggataatatttatgtgatcgcccctcaggtcaccgacgaggttgaaaacatggccataaagggtatgatccatctggagcgaaggcctgtgaaacgtcaggattttgactgggcatacatggtgatcgcggccacggatgataagcggctcaatgatgacatctaccgggtgtgcaaggagcaggggatttatgtaaatgtggccagcgacaggaccaaatgcgatttttattttcctgggatcatcaagcaggaggagatcatcatcgggatcaacgccagcggagtggatcatgagaaggccaaagaggtgaggattcagttggaagaattcttcgacgcaaaggccaggatgaatcagaaaaaataaggaaaaggacagtaaaaatggacacaaggaaatggatcatcggcagccgggaaagcgtcctggcagtaatacaaagtgaaatggtgcgtaagtacatagagacagcgaacccaggcgccaaggcagagctgctcaccatgaagaccacaggggatatgattttggacagaaccttggacaaggtgggtggcaaggggctgtttgtgaaggagctggaccgggcccttcttgacggaaggacccatctgtctgtccattctctgaaggatatgccaatggaggtcccaagggagcttccgttgatcgctttttctaaaagggaggatccaagggacgtgctggtgctgcccaaaggggtgcaccatctggagccagagaagcctatcggctgctccagtcttcgcaggattcttcagctaaaagagctgtacccccatatggaatgtaaaagtgtgagaggaaatgtacagacccggctggcaaaattagactctggccagtacagcgcccttatcctggcggcggcaggtttgaagcgcctgggacttcaggacaggatcagccggtattttgagccggatgagatgatccctgcggcaggacagggaatcctggtgattcagggcagggaaggcctttcctatgattgtctgacgggctatggggatgagaaggcagctgtggaggcccaggcagagagagcctttgtaaaatatctggacggcggctgctcctcgccggtggcggcctttgcccaggtacagtccggggagcttctgctccggggcctgtattataacgaacagacaaaacggtataaaaagggccggttgtccggtcctgcctctcaggcagcacatctgggggaaacccttgcacaaagactgaaagaattatgtgacagtgaggaagaagcatgagtacaggaaaagtttggctggtgggagccggccctggtgatataggactgtttaccctgaagggaatggaggttttgaaaaaggcagatgtggttgtgtatgacagcttggtgggacagggggttctctcccagatacccagggaggcccggctgatctatgtgggaaaacgggccagcaatcataccatgtgccaggaggatattaatgaggtgctcttgactgaggcccagaagggctgccgggtggtgcgccttaaggggggagatcctttcctgttcggcagagggggagaggagctggagcttctgagtgccaatcacattccctatgaggtggtgccgggagtcacctccccgctggcagttccggcctacaacggaatccctgtgactcatagagatttctgttcctcccttcatatcatcacgggacataagaaggcgggagaggcctatgacattgattttcaggctcttgtgaaaaccagaggcaccctggtgtttctcatgggtgtaacggcccttggagatatctgtgcaggacttttggaggcaggaatggaaccggatatgcctgcggcgattttgcagaaggggaccacggcaggccagaagcggatcgtggctacagtgtccacgttacaggaggctgtgcgccgggagggcatccacaccccggctattattgtggtgggaaaagtgtgctccctggcagagaaattcgcctggtacgaggaacttcccctggccggctggaaggtgctgctcacaagaccaaaggatcttatgtctgtcacagccgcaaaactgagagaaaaaggagcggaggtgctggagcttccggcgatcagtacccagcctttaaaggacagtgacctgtttcatgaggcgctttgtcatctggaggagtatcagtggcttgtatttaccagtcctactggtgtgaaggtgttttttgacaaaatgaaggcagccgggaaggatattcggtccctgggccgggctaaaattgcggccatcggggaggggaccaggaagaagctggaggagagaggcttgttcgtggacctgatgccagaaatctatgatggagattccctggggcaggccttggcagctgtgtgctctccaggagagaagattctgattcccagagcggaaaagggaaaccagaatctggtgcgccttttgcaggagaagggggctgttgtgactgatgcggccacttaccgcaccttgtacgagaccagcccggtgatcgatgagaaaaaagaatttgacggcggccaggtggactgcgtagtatttaccagcgcctccacggtgaaggggtttgtggaaggcacttctggccttgactatacaaaggtaagggcagcctgcattggaaaacagacaaaggcagccgccgatgccttgggaatgaagacccagatggctcaaaaggccaccatagacagcctggtggagctggtggagaagatgaaaggaaggaaagacacatggaattgatccaaagacccagaagattgcgaggcagcgagacactgcgaaaaatggtgagagagaccagaatggacaagtcctctctcatctatccgctttttgtgagagaaggagagaatctgcaggaggagatcccctccatggaaggccagtaccggtataccctggaccgcctgccctatgagctggaaaggcttcagcaggcaggggtgagcagcgtgatgtttttcggaatcccagataagaaagatgagctgggaagcggggcctatgatgagaatggaattgtacagaaggctcttcgggaggccaagaagcgtttccctgacctttattatatcacggatgtgtgcatgtgtgagtacacctctcacggacactgcggagtgcttaaggggcaggaggtggaaaatgacgccaccctggagctcttggcaaagaccgctctttcccatgtacaggcaggggcggatatggtggcgccctcggatatgatggacggccgtgtgctggccatccgccagtgcctggacaaaaacggctttaaggaagtgcctattatgtcctatgcagtgaaatatgcctctgccttttacggacccttccgggaagccgccggctctgcaccggcttttggagacaggaaaagttaccagatggattaccacaactccagagaggggttaaaggaagccttcacggacatccaggagggggcggacattattatggtgaagcctgccctgtcctatctggacattatttcccaggtgtccaaggccacccaggttccggtggctgcctacagcgtcagtggagaatatgccatggttaaggcagcagggaagatgggctacattgatgaagagaagattatctgtgaaatggcagtgagcacctaccgtgcaggggcttccatctatttgacctattttgcaaaggagctggccagattcatggatgaagggagaatcggttaaatgacaacatcggaaaaattgtttgaaagggcagtgaagtgtattccaggcggggtgaacagtccagtgcgggcttacggcgccatcggggaggtccccagatttatcgcacgtgcagacggctctcatatctatgacgtggacggcagggaatatgtggattttattgactcctgggggcctatgatcttaggccacaaccatccagaggtgagaaaaagcgtgataaaggcctgcgaaaatggcctgagctttggctgtgccacccagatcgaggtggagatggcagaatttatctgtgcgcatattccccacgtggagatgatccgtatggtaaactctggaacagaggcggtcatgagtgccatccgggcagccagaggatacaccggaaagaataagatcataaaatttgcaggctgctatcatggccacacggatgccatgctggtgagcgccggctccggagtgatgaccagcggcgtgccggacagtgcaggagtgcctaagggttgtacccaggacaccatgactgctgtgtacaatgatctggacagtgtatgcactctgatggagcaggcaccggatcaggtggctgcagtgatcgtggagccagtggcggccaacatgggtgtggttctgccaaaagaaggcttccttcagggactgcgggatctgtgcgacacccaccaggcccttctcatctttgacgaggtgatcactggttttcgtcttggatttacaggagcggcgggatacttcggggtggtgccggatctggtcacctatggaaagatcattggcgcaggtatgcctgtgggcgcttacggcggcagggcggatatcatgaaaatggtatctcctgtgggaaaggtataccaggcagggactttaagtggaaatcctgtggcaatggcagcaggactgactcagcttaaaattctgtgggaagacccctccttgtatgagaaactcaatgcaaccggggacgtgttctatgggaatctagaaagaatcctgcgggatgcaggggcaccctgtaccgtaaatcatataggctccctggccagtgtgttctttacacaggaaccggttgtggactatgcctcagcaaaaacttctgacacaaaggcctttgctgaatattttaaatatatgctgaatcatggggttcatctggctccttctcagtttgaggcaatgtttttgtccactgcccataccagcggagatttggatttggtattggagctattagaaaaatatttcagataattatagaggtgaacttgtctgggctggggaattgtggtacaattgttatcagaaatttctacagcattggaggttggacatatgggagataagcgatatgtggcttatgtgggaacctatacccatggaaacagtaaaggactgcatgtatatgatgtggacgtggaagagggacttctgatccagcggaacgaagtggaggtcagcaattcttctcacttatccgtttccaagaatggaaaatatttatattccatagaagatgagggagtcgctgtttttaagcgggatgaggaaagcggagatctgaagaggatcaacagcgtggatattgatggtatgcggggatgctggctggccacggatatcgacgggcgttatctctatgtgggcggttatcatgacggcaaggttactgtggtgcatacccacagggacggcagtctgggcagcctgatggacggagttttccacaagggccttggcagtgtggcagagagaaatttccgccctcatgtgaattgtgtgcgtccaacaccggataataagtatctgtgtgccgtagataacggaattgaccaggttaagatttaccagattaataagagaagggacaagctggagctggtggatattctgcgctgccccagagaaagtggtcccaagatcatccgtttcagtgatgacggaaaatttgcttatattctttttgagctgagcaatgagataaaggtttacagctatgatggaacggggaagaatccggaatttgagcttctccagtctgtgtccaccacctccagccaggatccggagcataaccgccactgtgcggcttcgggactgactatggcaaaggatggggttcatttattctgcacaacagcaggagaggatacggtttccatgtatgagagagatccccagaccggccttctggagaggaaatttgtgctgcccatcagcggggagtatcccaaggatctggcagtatttccagacaaccggcatctggcagtgttgaatcatgaaagcaacaccatcaccacctttaccattgactatgagaaaaatgtgatcgccatgcacggaaaacccttgaagattgagacgcctaacagtatcaacattcttgaggttcctgcagattgggagagaagataaaccaggagaatcatacaaaaagatgcaggcagaagggtcgtcgctctaacgattttatatcgctggagggcggcccttctttattacataggaaagttcgttgaactttcctatgtaataaaaaccctccgggggatgcacacaatgtgccagggaaagctgctttgcagctgcacattggcgcacaaagctgccaagcccctcatgagtgaggggatggggagttgaagcgggtttgcccgctttgttctttaacagaaatgatccattgagaagacagaaggaagcctagaatatgaaaacaactggaagaagcagattcagagagaaatttattggagataagaaattttatgctatgattttggccatagcagtccctattatgatccagaacgggataacgaactttgtcagccttttggacaatattatggtggggcaggtgggcacagaacagatgtccggcgcggccattgtgaaccagctcatctttgtgtacaacctgtgtatttttggaggagtttcgggggcaggtatttttacggcccagtactttgggcagaaggactatgaaggcgtccgccacaccttccggtataagatctggctggcgctgatcctgaccattgggaccattgtggtctttctggcagggggtgatcagctcatcagtttgtatttgaagggagaaggaagtgcggagaatctggcagctactttaatgtacggcaggcagtatctggtcatcatgctgctgggactgcctccctttatgatggtgcagatttattccagtaccttaagggagtgcggggagacggttctgcctatgaaggctgggattgcggctgttgcagtgaacctggtgttaaattatgttttaatctatgggaaatttggctttcccacattgggggtgcagggagcggccatcgccactgtgatctccagatatgtggaaatgatcattgtcatcagctggacccacagacataaggagaagaatccgtttgtggaagggctttacagtactttgaaggtgccaggacggctcaccaggaaaatcctggtgaagggaactccgcttctggtaaatgaagccttgtgggcagcaggaatggccatgctcacccagtgctattccatcaggggcctgaatgtggtggctggtttgaatattgctaataccataaacaatgtatttaatattgtttttattgccctgggggattctgtggccattgtggtgggacagcttctgggagcaggagacatgaagaaggccagagatacggatacgaagatgattgccttttccgtattctgctgcacaggcattgcgctgctcatgctggtgctggcgccctttttcccggagctgtataatacaaatgcccaggtgaaagagctggccaagtattttataatggtgacggctgttttcatgcctcagaatgcatttcttcatgccgcctattttaccctccgttcaggaggaaagaccattgtcaccttcttatttgacagtgtatttatgtggtgcgtcagtgtggtcatcgcctataccctcagccattttacaggccttccggttctggggatctttatcctggttcagctgggagatatggtaaaatgcattgttggatttgtgctggtgaagaaaggtgtgtggctgcagaacattgtgtcatagggaaaaattgtcacaggaaggtttccggttaaggaaaataggacctctgttccatgaaaggctagaattttcatggaacaggggtccttgttttattgcctattacagattagtttttataaaaatctacaagcttgtccattttggcagacatgttggcaaagagcaggtccaccagggtgatggcgcacatggcctctaccaccaccacagcccgggggacaatgaccgggtcatggcggcccttgatctccagagtgatgggctctttttccctggtgacagtctcttgggggcgggcaatggaggcggtgggcttgatggctgcccgcaggagaatggtgctgccgtcgctgagtccgcccatgatgcctcctgcatggttggaggtttttacaatggccccatccgaaagggtgaaaccgtcattgtctgtggagccgttgagcatagcggcattgaggccctcgccaatctctactgccttcactgcgccgatggacatgactgcctgggccagcatggcatccagcttttcaaataccggttcccccacacctgcgggaacaccggagatctcacattggatcgtgcctcctgcggagtccagatttttcatgcactgctctaggtattcgccggcttttttggccgcctgggcatccggcatatagaaggcattgctggcgatctcatccaaagagaaggtctgtgcttttacagggccgatggagctggtgtaggtgcacagggtgatccccagttcctgtaaaattttagaggcgatggcgccccctgccacccggccgatggtctctctgccggaggtgcgtccgccgccccggtagtcccggaagccatatttttggtcaaaggtgtaatctgcatggcccgggcggtagctgtctgccaggttgccatagtctctggagcgctggtctttattgaatacgatcatggaaatgggggctccggtggtttttccttcaaacacgccagagaggatctccacctcatcaccttccttacgtgcagttgtgtagcggctttgccccgggcggcggcggtccaggaagttttggatatcctccccgcacagaggcaggcctgccgggcagccgtctaccactgcacccagggcttttccgtgggattctccccaggtggtaatgcggaatctggtgccaaatgtagaaccgttcatatgtatcatcctttctgtatcttttcgtaaaccatggaaactttcatggatagttccgaggattttgaaatatgctatctattataagcgatggtaaaatgtttgtaaactcccgggtttagaattgacaaacaaagcctttgaaactataatcccacgtttgacactttgttacgttaaaaatcccagaaaacattgaaaaatcgatgttttctgggatttgttgatttttatgaaaagcgtactaactttttccagctacctcatttttgatctacggataatcccctgcatcgcctttgtacggataatctcataatcggttatgaaaccggcatactcgtgaagtgcatccgtcagatcagtcgcagtatacgcaggaacgtacccggcatcctttgcttttgtcacgcgcatttcccgcagagtggacacaatctggtcacaggtatatttgtccccaagtttcttttccagcacacggtaaaccagaagtgacatgaaacaggtcatgaagtgagctttgatcctgtctgcccggcttaggtatgcgggtctggacaggaactcgtctttcatgatccggaaagattcctcgatctcccagcgccctctgttaatcttcaaaatttcgggtacatcatcatcaaggtttgtctccacagcataaaagccgtcatattttttctcctcagcgatcgcatcttcattcagggaataactcacattcacctttttgcctctgctgtttttggcttcctgtttcacaaagcggcggaaatcatgctggtttttcttttcaagggaagaatggttcccttcgatggctgctatcgcgcgctggatctgcccatcccgtttgtaacggagaaagttgcggtattttaaggaaaaagtgacgatcagtgtttggttgaattcaatatccctttcttcgtcatagtcttcgatgtatttcagtttataaaaaatcttgtcgtagttttcttcttgatctttttcgttatcttctaaatgctcgatattataaagcttgctgctcccttccatctgccagccatcgggtgccaggcaccattcctgcagttcttttcccatcgtctttacggagactgtggtgacaaaggagcgctcgccgaagttgttgaacttccggtttgcctcgctggcaaggccggcgtctgtgcagacaacgaatctggacagttcgaagtcctgcaggattttctcttccaacggtataagggtggtctgctcgttgcggtttcccctcccgatacagatggcaagcgggatgccggaataatccatgaacaggcccatttggacgagtggggaaggctggtgctgcttgctgtgcccgtatttgcgtgctgccgtttccagggcatcggcttgcgcattggaaatggcgtcttcttcttccgtttcaaaatagaaattcgtgcagtcatagtagagaacaccggttttccgagggacaacgcaagagctgaatttatacagctccgcttgtatggagtcaaactccgaagcgatcacggacagtgctcttgcgacctggtggtattcgaaatccgggggctccagtaaccctttggaaagacgacaggtagagagcttagagccagggaaaagaatgcgtccgtagatcaggcgggaaaggatagcgttcatgtcatactggaaatgatgccgtttggttatgtgcctagctatcagatcgatgcagagctcatagtaaactttttgcaggaagaggtagccgatgttgaaagactgtctctcatttttcgggatgcgtgtatagggggagtacggaacaagtatcttttgattttttcttgcctgatccttctcgttgagctcagccagatgctcctgcatccactgaaacggatccgcgcagtgatacttttcagagatttcttcaggatagccaagtttctcgtaggtttcactggtgttttttccatttttgtagaccgaccggatgatatagtagcatttacctttttgtgtttggttgtacttaagacgcatttgaggcacctccgcaagatatagtatccatatggttatagtataccacaaagtacgatagtacgcaatataaaaatatttatttgacacaaaaatataagcctatcaaggctttgggggattttgagtgtcaaacgtccgggtccaggaagttttggatatcctccccgcacagaggcaggcctgccgggcagccgtctaccactgcacccagggcttttccgtgggattctccccaggtggtaatgcggaatctggtgccaaatgtagaaccgttcatatgtatcatcctttctgtatcttttcgtaaaccatggaaactttcatggatagttccgaggattttgaaatatgctatctattataagcgatggtaaaatgtttgtaaactcccgggtttagaattgacaaacaaagcctttgaaactataatggaaactgtatttttatgttttaaaggactaaaatacaaatgagggagaagggaagtgaaatcgtggttaatatctataagaccatagacggattgattcaggagatccctgaaccccaggacggatgctgggttgccatgacgaatcccacggcaacggagatctatgaaatatccgaacaatttcagatagaggttgacgatttaagggcccctttggatgaagaagaacgttcccgtattgaagcagaggataattatacattgattcttgttgacgtaccggttgtggaggagcgcaatgacaaggattggtatggaaccattcctctgggtattatcgttacagacaagatgatctttaccatctgcctggaggaaacccaggtgctgaaccgttttatggagggccgggtgagaagcttctatacgtatatgaagacccggtttatcctgcagattttgtaccggaatgccagtgtttacctgcgttatctgcgcatcattgacaagaaaagtgagcagatcgaggaaaagcttcatgtgtccaccaggaatcaggagcttttggagctgctggagctggagaagactttggtttattttaccacctctcttcgttccaacgaggtggtgctggagaggcttctgaagatggacagtatcaaaaaatatccagaggatacggagcttttggaggacgttatcattgagaataagcaggcgatcgagatggccaacatatacagtggaatcttaagcagtatgaccggaacctttgcctctgttatttccaataacctgaatattgttatgaaggttctggcagtgatcaccattgtcatggccattcccaatatggtctatggagcctacggtatgaatgtgaatctggcagggatgcctctggcggacagcccctgggggttctttgcagtcatcggcttttccctggtgctgagtctgatcgcggctgtgattctatccaaaaagaaatttttctaaaatattatcagtgagaagaggttgtgtatgaatttcctgaacaagctagaaagaaagtttggcagaaggggcggtattcaaaacctgacgttgtacatggtgatcggctatgtgatcgggtattttctggagatggtcagccctgcttttatgaactggctgaccctggagccagccctgatcctgcggggccagatctggcgtctggtaacctggatcattagtcctccagccaacaccaatgtatttttgtttgccctgacgatcttgtttttttactatcccatcggtacctccatggagagagcatgggggagcttccggtataccctgtatatcctttccggtatggtgtttacggtgatcggggcttttttgctgtactttatttatccccttccggtggggttcagcggattgatcttttccacatactatgtgagtacctctattttcctggcgtatgcggccacattccccaacatgcagcttctgctgtggtttgtgatccccatcaaggtaaaatggatggctttcgtgtatgtggcgatcattgcctatgatatgttcaattatgtgcgcagcggtttatggtttatggttattccagtgatcgcctctttattaaactttgttctgtttttctttggaaccagggatatgagcagatatcatcccaaggagatcaagcgcaagagagagtttagaaaagccatggagcctcagggaagggtgaatccttccacaggaggaatttcaaagcataaatgtgccatctgtgggagaacagagctggacgatccaagtctggagttccgtttttgctccaaatgcaacggaaattacgaatattgccaggaccatctgttcacccatcagcacgtaaaataggaggattaacatgaaaagaacgaagattatctgtactctggggccggcagtgggaagcaaggaaattttaagagccttgatggagggcggcatggacattgccaggctgaatttttcccatggaagtcatgaggagcatgcccagagagtggcatgggtgaaggagctcagagaagagctgcagattcctgtggctctgcttcttgacacaaagggaccggagatccgtaccggtttattaaagggcaaagaaaaggtggttctggagacagaccagaccttcgttcttaccacggaggaatatctgggagatgctcagaaggtatccatcacctacgagaatctcacaaaagatgtgaaaccaggaaatactattttgatcgatgacggtctcattggtatgaccgtaaaggaagtccggggcaatgacattatctgtcatgtggtcaatggcggagagctgggcgagcacaagggcgtaaatgtgcccaatgtgaaagtgaagcttccgggcatgacggagaaggacaaagaggacattctctttggcattgagcagggctttgactatattgccgcttcctttgtgagaaatgcggaggtgctctgggagatccgggagcttctggatgaacacggcggcaaggagatggggatcattgccaagattgaaaatgctgagggtgttgaaaatatagatgagatcattcaggtttcagacgggatcatggtggccagaggcgatctgggcgtggagattccagccagccaggtgccccatattcagaagaagatcatcgcaaaatgcaataataattatgtgccggtgatcactgccacacagatgctggactccatgatgcgcaatccccgtcccaccagagcagaggtgactgatgtggccaacgccatttatgacggaaccgatgccatcatgctctcaggggagacggctgcaggaaaatatcctctgaaggcattgagtatgatggtggaaattgcagagaccacagagcagtatctggattaccagattcaccgggaaaaccggaatatgtaccgtcagggagcagtgtccagtgccgttggactggcggccgtgagcactgcccaggagctgaaggcaaaagccattgtcacccccacggtgtccggcaagactgcctggcttatttccaattatcgtccccaggttcctatttatgccatcacgcccaatgaaatctgccagcacaagctgcagcttgcctggggtgtgatgcctttgaagggaacggagaaaaattccacagagcatattatttcccatgccatgaatactgtgagaaagaaaaaattagtggataagggagatctggtagtatttacagcgggagatccggctaccaacatccgtaccggtgagggagctgtgacgaatatgatgcatgtagtagaggcaaaataagtgaaggattttcataaggattgaatgcaaaattcgaggcacttggaggagaattattatgaagaaaaaaccatttgtaaccctggaaaagctccaggaaatagtaaaagaatatcctaccccctttcatctttatgatgaaaaaggtatccgggaaaatgccaaagcgctgcgggatgccttttcctggaactcaggatttcgtgagtactttgccgtgaaggctaccccaaatccctacctgatacagattcttcaggagtacggctgcgggtgtgactgttcctccatgacagagctgatgatggccaaggcccttggatgcaaagagggagagatcatgttttcctccaacgatacccctgcagaggagtttcagtatgctcatgaaatcggggggatcattaatttagatgatatcacccatattgcttgtctggaggaggccatcggcgctatcccccagacgatcagctgccggtataaccccggcggactatttaagatcagcaatgacattatggataatccgggagattccaagtacggaatgaccacagagcagctctttgaggcttttaagatcttaaaagaaaaaggcgcaaaagagtttggaatccatgcatttctggccagcaatactgtgaccaatgagtattatcccatgctggcaaaggtgctttttgaagtggctgtgaagctgcaaaaagagacaggggctcatgtgaaatttatcaatctgtccggagggattggaatcccttacagcccggatcagacgccaaatgatatccaggtgatcggtgaaggggtgcgcagggtctatgaagaggttttggttccggcaggaatgggcgatgtggccatttacaccgagctgggccgttttatgatgggaccctacggctgcctggtgacaaaggccatccatgaaaaacatacccataaggaatatattggtgtggatgcctgtgcggtgaatcttatgcgcccggccatgtatggcgcttatcatcacattaccgtcatgggaaaagagggccacgtaagtgaccatctctacgatgtgacgggctccttatgtgaaaacaatgataagtttgccattgaccgctatctgcccaagattgatatgggagatctcctggtgatccacgatacaggagcccatggatttgccatgggatataattacaacggaaaattaaaatcagccgagattcttctcaaggaggacggaagcttccagatgatccgcagggctgagacagccagggattattttgctacctttgactgcttccccatctttgagaagctcttggaggatgcgtaggctcacaggcctgcttctgtgcctgcttttatttgtgacatcctttgcacaggaggcaggtgcggcttcaacgggacaaggaccaaaggtgagtatccaggtgagaagagtcaatacctggaatgaggcaggaaaatcctgctctcagatcaccatggtgcttaccaataaggagaaaaaaaccattacagactggacgctgagagtggcttttgacagaagcctgcagcttgtaaatggatggaacggcagctatacagtgaacaagaagaccatgaccgtcacaccggcagactataacagacagatcaaggcaggagagaaggcggagatcggttttattgtaagatcctcaggaagaattttgtacaatacagccaagtggacggtgaaaatgggcggaaagtcccggacggccacccaggtgaggaaggggtatgcagacagcggctcttcttcaaagccttctctgtcccaaacgccagttcccaccaagacaccggcagtgaaacctgtgcctaccaaggcgccggtaaagaaaacacctctggcagccaacggaagacttcatgtgaagggcggcaatcttgtaaatgaaaaaggaaaagccgtgacgcttaagggtgtgagcacccatgggcttaactggttccctcaatatgtaaatgcatccgcctttcggtacctgagagataaatggggagtgtcctgcatccgtctggcaatgtatacccaggaatctggcggatattgcagcacaggcagccaaagtgagctgaaggcccttgtgaaaaagggagtaaaatgtgccacggatctgggaatgtatgtgatcatcgactggcatattttaagtgacggggatccccgcgccagccagaaggaggcagtctccttttttagggaaatggccaggacctataaaaaccagaaaaacgtgttttatgagatctgcaatgagcccaacggccctgtttcctggaaggacgtgcgttcctatgcccagactcttgtgaaaagcatccgggctaatgacaaaaacaatgtgatactcatcggtacacctacctggtgtcaggatgtggaccaggcagcggggctgcctttgaagggatataccaatctcatgtatacctttcatttctatgccgccacccacggacaggcttaccgagataagctggaccaggcagtcagccagggcctgcctgtgtttgtgagcgagttcggcatttgtgagagctctgggagcggccgcctggataaaggggaggccaaccggtggatgagttatctgaagaagcataagatcagctatgtgtactggaatctttccaataaaggggagagtggttctctgctgaaaagctcctgtaccaaaacaggcggttttacatcaggagacctgacggcagcgggcaagtggtaccaggctgtatagtagaacaggaaaagaaacatcagtgcgaaaaagggtatgtgtatgcatatccttttttttatgttaaaggaaagttctccgaacttgcctataacataaaaagccctccgggcgggatgcacacaatgtgccaatgtgtagctgcaaagctgccaagcccctcatgagtgagggaatggggagttgaagcgggcttgcctgctttgttacttaggaaggttcgaaggtgtttttttgaagaaacccccagagtttgtataaagatttatataaaaaaatgaaaatagtatgtgaaaaaatgaaaaaagtatgataagatagaattcggggaaataaagtataggacaaagaaggtaaaacgatgaaggtaagtgttcaaacgatcagtaaagagaccggtttttcccctgccacggtttccaatgctttgaaccggaagaagggcgttaacaagaaaacggcagagattatttggaaaaaggctgaagaactgggatatcgggtagaaaaccgattaacgaagattaaatttgtgatcttcagaagaaatggaaagattatagacgacaaccagtttcaccctgcggtgattgaaggtgtggagaagcaggcaaaggaattaggatatgagaccgtgttttgttatgtggatatccaggactcggattatgaacagagagtcaaggaaattttggatgacacttcaggggcagtggttctgctgggaacagagatgatggaaaacgactttgaaatttttgccaatgcaaagtgcaaggtgattctgctggacggatggagtgacaagtatttctttgacagtgttttgatcagcaatacagactccgcctgcaaagctgtggaatatctcatcagcagaggtcaccgggaaattggatatatccggggagactaccggattcaggcctttaattacagggaaatcggatatctgcgggccctggaacggtccggacttcctgtgaagaaagagtatctggccactgtggggaccaggatcgagactgcctatgaaagtatgaagcagtatgtggagcatgcccaaaagctgcccacggcattttttgctgacaatgacgtgatcgccattggagccatacgggctatgcaggaaaaaggaatacgcattccagaagatatatcggttattggatttgacaatatcccatatgggatgatctgtaaccctcctctgaccaccattcatgtgtataagcaggagatgggggcagtggcagtgcgggagctgatggaagcagtgcagaatcccggcagggtaaagatgaaaatacagctgtgtacggaatttatagagcggggaagtgtgagaagtcttacccagtccaaaagttagaaaaattagaaaactctttttggcatggaagctggtaagacgggaattcatcaaatacaataaaaacaagaaagccttttctggtacagaagccggagagggcttttttaaaatttacagccaaaatagtaaaaattttaataaaccatttaacttttattagaatttgatataatcagttttaacttctatattcatttacggaattttggcttttaccaaaaaatgtatggggacagagcggggaggggaagacatgaatgttttgatagtggacgatgacagaatggctgtggactgtacggcgtccatggtggactgggatggattgggaattgcgggggtgtataaggcctacagcaaaaatcaggccgtggcagttattgagcagatacctgtggatattctgctgtgtgatatcgaaatgcccagggggaacggatatgaccttctcacctggattgaagatcatgagtacaagatagtgacaatcttcatcaccagccatgcgaaatttgaatatgtatccaaagccatgaagatgaaggtggtagattatattttaaagcccataccaagacaagacctggaaaaggcagtgaaaaatgcggtggagctggtggaaaaagagcggaagcgggaagcggacgaaaaatatgcctcctactggaattcaggaaaaagcgtgctggtgcgggagttttggaaggaaattctggaggatggctggacagatgccacgctggtggaagagaaggcacagaaggtgggggtatctttaaaaaaaggaaaatgctattatcccatccttgtgcatttttctgtggaaaaacaagagtcagcatcctggaacaacaagatcctggaattctccataggaaatatcagttctgaatttttatttggtaagacagacagtggaaatcttctttttctggaggagggaaagctgctggtgatctatgaggcagacagggagaccaatgccatgcttgcggataagagcagatatcttatccggcagctaaaaaaatacttaggtttctgcaatttttctgcttatgtgaaggaaaagacagaacttgagagtctggcagacactgtaaaaaaattagatgaatatttagccgggcagttctattttcagtgcgatgtatatgaggtaaaggagcaggaggtcctgcccgggagtgacctgggagctgtggagctggtgaaggagtacttaagggccaacaaagccagggaggtcaccagaaatgaaatcgctcaggcagtccatctccatccggattacctgtcccgggtctttaaggcaggcgttggcatgtccataacagactatcttttagaactgcgtatgaaggaagcgaaaaagctgcttttgaattccaagttgcccattacggatgtggccttgtctgtggggtatcaggatacctcctattttacaaggcagtttaaacgcaagtgtgggatctctcccagagactaccggaaaaatgcaggatggaggagtgatcaatgaagaacagacgaaaatccctgcgttttcagtggaccttcagcatcctggccatgtttgtgggcatgctggtgatcgtgactctgtacagcttttacattgtccagagcaacaaaaaagaaatgtaccgcacactcatggaaaatatgaagttccagatgaatcaattggagagaaatctggaggaagtggaggactttctcattgagcagaacaccctgaaggtggaatacacagaaatcgcaaaccataagacagagctggattattatattgcccaaaataatatccaaagcagcttccgttcagcgctggctgattatgattatgtggatggcttttacctgtatcatccttctgacgggctttttgtcacagccactcaaaatgatctaaagcccgcatctgtaaagcggataaaaaatctgctgttcagtctgggggtgcgctattatcatctccccagggaagagaaaaacaactggctgcttctggatgtgggaggagagccttatttgatcaagatcatggaaaattatggctcctacgtgggaagctttgtgagaatgagccggctttcagaaggttttgagatgataggagctgcctatgcctgtgatctacagggggtgcccttgacagagcctgctgataagaatacctggagtgagaaaaagggctggaatcaggcaggccatatgctcctggaaaagaaatgtgcgtcagggcctttttcgatagctgtgctggtgaaacaagggaccttgacggaaaataaaggctatctgggttatctggccattgggatcctgtttcttctggctatggggctgtttatttcctatcagttccgctatcagtttgccgggcctcttcagcgcctcatggaacggatgggcaatgttaagccggataaagcaagtggctgggatactaaagaggaatgtgaagaatttcagaaggtgtacagcaccatggatgaaatgatccagcgcattcatcagcttaatcaggaggtctatgaagaacggatccagagacaacaggtgagtatccagtatcttcaattacagatcaaccctcactttcttattaattgtctgaatctggtgagaaatttaatttacatgaaacgggagaagcaggcagaggcggttaccgtggaggtgggaacgtacatgcgttatgtgatgcgctctcagaactgggtcaccttaagagaagagctggaccatgttcaaacctatgtgggaattcagaaagtgcggtatgaggaatttctggaatatgaggaagacatccaggaggaaggaagaacggtccggattcccattatgctgattcatacctttgtggaaaattctgtgaagcaccaggggggacaggatcatgttcttaaggtgaaggtacaggcacaggtgaaagatgggaaattagagatttgtattaaggacaacggagacggctttgaagctgcggtcctggaaaagcttaaaaataaagaagtgattttcaacgaatatggggaacatgtgggaatttacaatgtgtgcaggcgcttggaggtcctttatggggaggaggcttccattgaatttgcaaacggaccaaagggaggggctttggtgtttgttagcctgcctgttaaggagatgggaaaaagtgtttagaaagattgctgcaggtataattttcatgatttccgtaagccttgtgtgtgcaggctgcggcagggagcagaagcaggaagaggcggccgtgagtattccgcagctggtggtggtgtatcccggcgatgacaaggataaggagctgatcgaagaaagagtgtcagaaataaccagggaaaagctgggcgttcatgtaagactggagattctttcaggcacaaattatcaaaccagtgtaaaccggatgctttccagccaggagcaggtggatcttatgtatgccacccgacctttggtccaggaaaattacatgcaggaaagacttattgacctttcagagctgatacagagccatggacaggggatcatccgtgaagtgggggaagagaatgtagagacctgcaggatcaacggaaagcttttcggggtgcccaataaccgggatgttgcggaagggtgggattcctatgccatatcggctgagcttatggataaatatgggatttccaaggaggagatccaaacctatgaggatctggagcgggtcttcgcctacattcataagcaggagccagatatttacattgtggacactggctcagaaaccatgggaaataatcaatattttcttggaggcatcgcctccggaccctttgggatcatgatgggaaatggggaggatgaggaatttgtaaatgtatttgagacagaggaatatatgaattttttaaaaagagtccggagctggtatctgaaagggtatatgacgaaaaatgtcataacagagcaggagacctttgcggacaaaatgaaaagcggcagactttttgcctatacgaccatctataagcctggaattgaggaacaggagagggtcttgctgggaaaagatatgaacgtggtacagcttgggaaaacgatcattacatccaatcaaagagccggcattcaatggtgcattacaaagaatacagcatcccaggaaaaggccatggaattaatgaacctgctgtatacagacagtgacatcatgaatctcatggcctatggggtggaggggatccattacaaaaagacccaggatggatctctcacctatgccaaggataaggaccggtactattttgcgggaagaacctggatgatgccaaactctttcattttagatgtgtgggagggaagccccaaggacttatgggaggagtcaagaatttttaattctacagcggactatacctgtgatcagggctttaattttgatatcaccaacgtatacggggaatatgtgaaactgcaggaaatctatcagaagtaccggatcattttggaaaatggcatggttgacccggaatacggctgctggaagatgaacgaagagctgaaaaacaatggcctggaggaagtcatcaaggaaaaaaacagacagtttcaaaggtggaaaagagagacaaaaaataaataaagaaatgaaaaggtaaggattctccagattttggtcagaatccttctttttttggagaaggtctgctgataaaatcaataacatcaaaagcaaagaaaaggtgggtaatgattatgagaagaaaacagttatggaaagtggtggcagccgcattgatggctcaggcaatggtattctccgggggtctccctggcggcggcgcagaagttcaggcacaggaggaagcacctgcgcaggaagagcctgctgaggaagcgcctgcagacgatgcagccaaggatgaagaaagtgcaccggatgcagcggacacagctgaggatgcacagggggaagcggatactcaggcagcccagaagcagaggatcatcatcacccaggacggtgaagtggatgatatgaactctctggttcacaccctgctgtatgccaatgattttgaaattcagggtattgtgcagtccagctctcagttccactggagcggagacggagaagaagagccttcccgctggccgggaactgactggatgaatgaattcctggatgcctatggagaagtttacgacaatctgtccgtacattctgacggttatccaaccgttgatgagctgagaagcatcaccaaagtaggaaacgtgaagtccttaggcgaaatggaagaggtgacagaaggctcagagctgatcaaggagcggatcctggacgatgaccagcgtaccctgaacattgcagtgggcggcggagccaacacactggcaagggctttaaagtccattgaagaggaatacaaggatacagattcctgggatgagatctacgaaaaaatctgccaaaaggtagttctgcgtgcctggggacagcaggataatgcttataaggagtatatcagtgttgtgtggccaggaattcccatgatcgacatcagcggcgtatccagcccttacggatacggatgggcatcaaccggcggctctggtctttctgaagaagccaaggcaaaatacaaaggtgactggatgtatgaaaatattgaaaacggtcacggcgcccttttagataaatatgttacctggggtgacggaacctatctggacggtgaagaggacggaagccagttcggaaccaatgaagcactgctggacagccttgactggtggggcggccagttcatgggccttcaatacagccgttatgatttcctgtcagagggagatacaccggactggatgtgcatgatcgacacaggccttcgcagtctggaggatccttcctatggcggctggggcggaagaaccgtaaagacctcctttggtgacagtgaagatgctgtttattatgagcagagtaaaggcgagcgaagcatgggatactttggtgaagagatccaggacgattttgcggcaagagcagactggtgcatcgctgaaaaattcgaggatgccaaccatgcgcctatagtgagtgtggaagaagggatcgacctggaagcagctccaggggaaaccgtgactttaaatgcaaaggcagaagatccggacggagacaatgtaatctttaaatggtggcagtatgccaaggctgatacttatgcagagccggccgatgaaaacggcgagacacagaccattgccatctctggcgctgacacagcccaggcgagctttaccgtaccgggagatgcaaaatccggtgacaccatccatatcatcttagaaggagaggatgacggagaacacacgctcaccagataccagagagtgatcgtgacagtaaaataattgggtaaaagaaagcatccatgaaatgagggaaaacagcagcgctggttttacccaggtttggtggatgcttttctatgtaataaaaccctccgggggatccacaaagctgtctagcagctgcacgttggcgcacaaagctgccaagcccctcatgagtgagggggacgggagttgaagcatgcatgcccgctttgttttatcacatgggaaagagttgataaaaatttataaaaaaacacaaagggacatttcaaaacttttttatataaatttatataaaatttttggagataaaagtagaaaaaaggagggaaaaagaaagcaaagaagctaatacaagaaaatatgcacaaaaaaacatactaaacttctgtataattgacgaaaatgagtttttgaataaaaatttacgaaaaaactattgaaatatttatataaaagtttataatacaaaacagatagaacaagaaacacatctcagaggaacaggaggaggcatgaaggcaaatataaaacaaatcagtgaaataactggcttctctcccgcaactgtttccaacgccctgaatcataaacgaggagtcaacagggacacggcagagaccattttaaaaactgccaaggacttaggctaccagacggaaagcaaaatagagaaaataagatttgtcactttccggagaaacggtctgatcattgacgacagtactttttttcccgcagtgatcgaaggcgtggagcgccaggcaaaggaactgggatatgagaccacctttttccggctggactgtcaggacgaatcctttgaagaacagcttgaggccattctcaatgacaccaattccattctcatcattctggggacagagatgatggaagaggattacgaccggttccggggatatgagggcaacctgatcatcctggacggctggagcgaggccatgacttttgatgggatcctgatcaacaacaccgatgctgccacaaaggctgtggagtatctcatctccaaagggcacgagaagatcggctacctgagaggagatttcaggatcatggcatttcggtaccgggaatacggcttttaccgggtgctgcgcaagtacggtctggatgaaagctacgccatcaccctgggaacaaaaatggacagcgcttatgagtccatgaaacggtatctggagacagaccctcagcttccaaccgcctattttgcagacaatgacgagattgccttgggagccatgagagctttgcaggaaaagggaatcgccataccggatgatatctccattatcggttttgatgatatcgctttcggggccatcagcagaccggagctcaccaccgtacatgtataccgtcaggagatgggagagattgcggtgagaagagtgctggattatgtacagtacaaaaataagcaggcaaagacaaagatccaggtgtgtactcggtttgttgaacggggaagtgtaaaggatctgacaaaacataaaaatgacgtttcataattaattattacaaatatatcaggaggatgaaaaaatggcaaaagcaaagatcaaacttggctatgctccaacccgaagaagtatttttagtgcgccggacgcgatcaagtacagaggcctcacagccgacagactgaatgagctgggcatcgacttcgtggacattacagacattaacgaggaaggccttctttacaatgatgaggatatggaaaaaatcgccgaaaaattcaagaaagaaaaagttgacggcctcttccttccccactgcaactttggtacagagtatgaatgtgccagacttgccaagaaattaaatgtacctgttcttctttggggacctctggacgaaagaccagagccaaacggagttcgtcttcgtgatacccagtgcggattgtttgccaccggcaaggtgcttcgcagattccgcgttccgttcacctatatgaccaactgccgcttaaacgacccagtatttgaaagagggatcagagatttcctggcggtatgtaatgtagtaaaaaccttccggaatatccggatcctccagatttccacaagaccttttgatttctggacaaccatgtgcaacgagggtgagcttttagagaaatttaacatccagctttcccccatccccatgccagaacttaccgatgagatcaagaaggccaaagcagagggaacagaggttgccaaggttattgcctactgcaaagagaacatgaagatagagatcaaagaggacgagctggaaaatgtagcagccttaaaggtggccatgaagaacctggttgataaatacggatgccaggcagctgccatccagtgctggaaccagcttcagtctgaaatcggaatcatgccctgtgcagccaactcccttctcaatgaagaaggaattccggttgtgtgcgagacagatattcatggtgccatcaccgcccttctggtggaagcggcaggaatgggagagaccagaagcttcttcgcagactggaccatccgccatccggacattgagaacggcgagcttcttcagcactgcggtccatggcccatctctgtagcaagagagacacccaagattacctatcctctggcctttgaccatccgggagccatcactgcggaagcaaaacacggagaactgacactggccagattcgacggcgacaatggggagtattccctgcttctgggaaatgcagttggtgtggacggaccaaaaggcatgggaacctacctgtgggtagaggttcagaatattaaacgtctggaagctaagattgtggaaggaccatacatccatcactgtgtaggcattcacaaggatgtggtgccggtactgtatgaagcatgtaaatatatgggaattgccccagatttatatgaccccattgaagaagatgtaaaagcatatctcagaggggaatgagaaggaggaagaattatggaaaatctcaccgcactgtcctatgacctgagaaaaaatgtcattgacatgatccgtgcagggaaagcaggacacattggcggggacatgagtgtaatggacattctggtaaccctgtatttcaaacagatgaacgtcggtccggaaaatatggacgacgaggacagagaccgctttgtaatgagcaaaggccactccgtggaagcgctgtacgcagtcctggcggcaaaaggctttttccccattgaagaggttattgaaaccttcagcaaatttggatccaagttcatcggacatcccaacaacaagcttccgggcattgaaatgaattccggttctctgggacatggacttcctgtatgtgtgggaatggccctggcaggaaagatgaagaacaaagattaccgtgtatacaccgtaatgggtgacggagagctggcagaaggctctgtgtgggagggcgccatggctgcttctcactacaagctggacaatctgtgcgcagtggtggacagaaaccgcctgcagatctcaggaaataccgaggatgttatgcatcacgacgaccttcacgagagattcagaagctttggctggaatgttattgatgtgaaggacggaaacaacatccaccagctcaatgaagcctttgaatcagccaagaccgtaaaagggaaaccaacggttctcattgcaaataccgtaaaaggctgcggctcttccattatggaggacaaggccaactggcatcacaaggttccaagtgatgaggaatatgaacagatcatgaaggatctggacgagagaaaggaggctgctttaagatgagtaaaattgcaaataaacagatgatctgtgaggttttaatggaagcagccaagacggataaaagtattgtagccctgtgcagcgattccagaggaagcggctccttcactccttttgcagacacctacccggagcgttttgtggagaccggcattgctgagcagaacctggtaagtatttccgcaggccttgcaaaatgtggcatgaaaccctatgcagtatctcctgcctgctttctgtccaccagaagctatgagcaggccaaggtggatgccgcttattccaataccaatgtaaaactcatcggcatcagcggcggcgtcagctacggcgctctgggcatgagccatcactccgcacaggacattgcggcaatgtctgcaatccccaacatgcgggtatacattcccagcgaccatctccagacagcagagcttaccaaggctcttcttaaggatgaaaagcctgcgtacataagagttggcagaaatgccgtagatcccatctatgaagaaggaaatgttccctttgagatggacaaagccacggttatatgcgagggaaccgatgcagcgatcattgcctgtggcgagatggtaggaccggctgtgcaggcagcaaccttgttaaaggaaaaaggcatcagcgccacagtggttgacatgtactgtgtgaaacctctggacaaggatgcagtcatcaaggcagcacagaacgccaaggtggtagtcactgtggaagagcacgctccctacggaggcttgggctccatggtcagccaggtagttggcgccaactgtccgaaaaaagtgatcaacctgtcccttccggacgagccggtgatcaccggaacttccaaagaagtgtttgactattatggactcaacggggaaggaatagcaaaaacagtggaaggattactgtaatggcaggaacatatattataggaatcgaccaaagtacccaggggaccaaggctctgctttttgatcaggcagggaacctggtgaaaagaacagatctgccccatgagcagatcataaatgaaaagggatgggtatcccatgatcctatggaaatttacagaaacaccgtccaggtggtgaaaaacctggtggaggaatcgaaaatatccaaggatcaggtagccgggatcggtatcagcaaccagagggaaacctctctggcctgggaccggatcaccggagaacccatagccaacgccattgtatggcagtgcgcccgggcggcccagatctgcgaccgggtggaaaaaaccggagcggcccagatgatccgaagccgcacaggtcttacactgtcaccctattttcctgcatctaagattgcctggctgctggaaaatgtggaaggggcaaaggagaaggcagaaaaaggtgagctttgccatggaaccattgatacctggctggtatataaaatgaccgaaggcaaatcttataaaacggattattccaacgcctcccgcacccagctttttaatatttttcagctgaaatgggatgaggagatctgtggactttttggaattaaaccggaaaatatggcagaggtatgtgactcggattccagatttggtgaaaccactctggagggctattttgaacatccggtaccgatccatgcagtccttggggattcccacggcgcacttttcgggcaaggctgcctggaaaagggaatgatcaaatccacctatgggacaggctcctccattatgatgaatattggtgaaaagccggtcctgagcacccacggggtagttacctccctggcctggggaatgggcggaaaagtaaactatgtgttggaaggtaacatcaactacacaggagcagtgatctcctggctgaaaaatgatgtaaagctcatttcttctccaggggagaccgagggactctgccgggaggcagagcaggacgacagtctgtatctcatccctgcttttacaggactgggggctccctactgggacagctatgcaaaagctgccctcacgggaattaccaggaccacagggcgcagtgagattgtccgggccggcattgagtgtattgcctatcagatcgcagacattgtgagggccatgagcgaggatgcaggacttcccattgaagagctccgtgtagacggcggacctacgagaaacgcttacctgatgcagttccagagcgatatgctggaagcaaaagtccaggtacctgatgcggaggagctgtccgggatcggcgctgcctacggtgcaggtctggcacttggggtctataccccggaaatctttggaaagctgaaacgaacagcctatgagccaaagatggataaaaacttaatagagaaaaagtacagcggctggaagaaggctgtgcagtctgtcctgacaaaataggacgggggaaccgatattgacggcaggaccgttaatatagaaaaattaatactttataattcattaggagggcaaaactatgaacaaaaaaatggcaagtgttgttttaagcgcagctatggttatgacaatggcaggtgcagccaacgtaatggcagccgatgaagaaccattaaagggaggcggctccaacattatctatgttattacaccgtctgtttccaatccgttctttaagacagaggctgacaaagcaactgctaaggcagaagagctgggatacgaagtaaaagcagcatcccacgacgatgatcccaccaaacagacagagctttttgacagcgccattgcagacaaagctgcagctatcatctgtgacaacgcaggtgcagacgctaccatcgaagcagttaagaaagcaaaagaagcaggcattccaaccttcctcattgaccgtgagatcaacgaagacggtgtagccatttctcagatcgttgccaacaactaccagggtgcaaaagccatcgctgaagtctgggttgaggcaatgggagaagaaggcaaatatgcagagcttctgggaaaagaatctgatacaaatgcaggtgttcgttcttctgcattccatgaagtgatcgaccagtatccagatctggaaatggttgcacagcagacagcaaactgggaaaagaccgaagcatttgacaagaccgaagccatcatccaggcaaatcctgaccttcagggaatcatctgcggtaacgataccatgcttgaaggcgcagtggcagcttgtgaagctcatggtctgaacatccccatcgttggtgttgacggatctgatgaagcagccgcactgatcaaagcaggcaaagctaccggtaccgcactgcagcaggcagctcttattgcagagatggcagttgagcaggctgaccagtatctgaaagagggaacaaccggactggaagagaaacagttagtagattgtatcgctattaccgctgacaacgtggacaatctgaaaaccttcgtttacacagaaggcggtgttgcagatacagaagaagcagcagatgacacagcagaagatgctgagacagaagaaaaagcggaataagagaatcggttttatagagtttttttaatcgtctgatacgccatctgaagcggaacataaaatcctgacaggaaggcatccgccttcctgtcttttagaaaagcggcaatcctaataagtattaatttttaaaccatcagaaatatcgtagctggatgaaaaagctttccaaagctttcaccataaagaaacaataaaggagacgtggctatgaaaaaacgtatgttagccttgggccttgtacttgcaatggcagcttccacaatgacaggctgtgtgaaggttgtaaaaatcggcgaggaatcaaaatatacaggtaagacagaatttaatgccggagacaatgtggctgaaatctgggaatcccaggctcttccagaattagagggaaaggcagttgaattaaaggatttccttacagaagcaaatggcgacttgaaatctctggttgacaaatatggcaaatattccatgggcaccagtggagagatcaattatgtagttaagggaacaggaactatccaggaagtgaaccaggagaaaaaagcagggtatatgaccttgaagctggatgactacgatggggcagaagtggtcaagattcagatcggatccgtttacaagggctcctccatccgtgattccctggatatcatcaaatttggtgactataccaatcagcaggattgggcggcagtttcccagagcattaacaagctggtggacgagcaggtggtacagccggcggatcccgcatccctggaaggaaagaaagttacgttcctgggcgcgttcactgccaacagcaatgatgaggttttgatcactcctgtggaactgacagcagaataggaggtgcgttatggctggaacatataaatgtcctgagggtgttttccttcactgtgaccatatcagcaagatttatcccggaacaaaagcgctggatgatgtatcctttgaccttttgcagggaaaagtaaatgtgcttatcggagagaacggagctggtaagtccaccttgatgaaaatgatcgcaggaattgagcatcccagtgaaggaaagatttttattggtgataaggaagtggccttccgtaataccacagatgccagaaagcacgggattggtattatccaccaggagctgagcctgtttcccaacctgaacgtatttcagaatatattcatggccagggagcagacaacaggcaaggtaaagctcaatgataaagtacatattgaacagacaaaaaagatcatggagaggctggagcatcccattgatcctatgacaagagtgggagagctgcgtgtgggacagcagcagatgatcgagatcgccagaaatctggtggccgatgatctgaaggtgctgatcatggatgagcccacctcctccttaagccagcaggaggttcaggtactgtttaagatcatgcgtgagctgactgcacagggaatttccattgtctatatctctcaccgtctggaggagatcatgcagatcggcgaccatgtgaccatcttaagagacggcagatatgtgtccgacgcagatgtaaaggatatcgacgttccctggattgtccatgagatgaccggcggagagaaatcctaccccaagagagaccgtcaggtggactggaaaaaggttcccaatgtgctggaagtgaaagacctgtgtcttcccaaggccggtggcggatacctggtagaccatgtgagctttgaactgaaaaaaggagagatccttggaatctatggcctgatgggagccggaagaagcgagatcttcgagtgtctcatgggacttcatccggaacacaccggagaagtgcttctggaagggaagaagatggagatcagctccatcaccaagcagatcgacaagggctttgccctcatccctgaggacagacaggcccaaggtctggtacagacgctggatatagagaaaaactgctccctgtccgctatgaagaggtacaaaaaagccggtgtcttcctggacaacaagaaggaagggcagaaggtcgatgagcagatcaaggatatccacatcaaggtggcggacaagaagctgccgatcctttccttgtcaggcggcaaccagcagaaggttgtcattggaaagggtattttaacagaaccgaaaattcttttgatggatgagccaagccgtggtattgatattggcgctaagacagaggtgtttgatatcatcaatcagtacgcagagcagggtctgtcaattatcgtgatctcttctgaattgaaggagatcgtggcgatcgcagacagagtcatggtgctgtccaatggtattaaaacaggtgaattcactggggatgagattcaggaagacaccctggtactggcttcttataagggccatcacggacattaagagaaaaaggagaaattgaattatggcagagaaaaaatcatccaataatgcattgatgatgaccctgttaaagggcagaaccttcatcgtgctcattatcttagttatctttttcagtatcaaggcgcccaacttcctcaccgtaggagccttgatgaccattgcaaaacacgttgccctctacggcattctggcaattggtatgacctatgtgatcatcaccggcggcattgacctttctgtaggttctgtagtaggattgtgcggtatgatcgcaggcggcatgatccaggaaggtctggtcctgagctttgctggcgttaccttatacttcagtgttcctctcattgtggggatcaccatggttctgggagccatcatcggagccttgaacggtgtggtagttaccaaatgtaaggtggcaccatttatcgcaaccctgggttccatgtacatctgccgtggtctggcaaacatccgttccaacggtgccaccttctctgatctggcaggtcatgacggactgggaaatacaggctttgaattcttcggacgtaacttaggcggaaccattctccccgttggtgttatcattcttgccatcgtagctgtgatcgcaggggtgatcctgaagaaaactccattcggatggcacgtgctggccatcggcggaaacgaaaaggcttccaagctttccgggatcaaggttgacaaagtaaaaatctgggtatatgcgttctcaggcctttgctccgccatcgttggtatcatcgcaacctcccagcttgtatctgcaacccccaagactggtgagtcctgggaaatgaacgccatcgcagcctctgtacttggaggaacctccatggcaggcggtgtgggaaccatcggcggaaccatcgtaggcgcattcgttatcggcgtgatcaacgacggtatgaccatgtgcggcgtaacagagttctggcagaagatcatccgtggtcttgtgatcatcgtggcagttatcattgaccagttccagagaaacatgcaggcaaagatggcacttcaggcccgcaatgaaaacaaataatttgtgagatccagatacccaaaagagcaaagtacagcatctgccttttgggtatctgttgctattaggccaaggtttccggttaaaaataaaaaaatattattgaaaaaaagaaagaaggtatttaaaatgaaaaagagaggaattataaacgcccagcttgcaggctatattgccggattgggacataaggacacatttatgatcggcgatggaggaatgccaatacccaagggcgtgcccattgttgatctggcactgtgcgggggagttcccacctttaagcaggtgatggatgcggttttggacgagacagaagtggagttttatacattggcagaggagatcgtggagaagaatccagagcttctttcttacattcaggagaagcttcccaatgtggagtcagagaggatccctcatgtggatttgaaggaaatgtccaagaccgtgaaatttgctatccgtaccggtgagtttacaccttatcccaatattatccttcgggcaggagtggcatttcctgcataagcggcaaacgataaggaggtagcaatgaaagtattaaattttggttctctgaatctggacaacgtatataccgttgaccatatggtgactccaggggaaactctggcatccggtgagctgaatgtcttctgcggaggaaagggactgaaccagtccatagctctggcaaaggccggtattcctgtataccatgcagggatggtgggagaagagggagctcctcttctggaggtatgccaggaaaacggagtaaatacccagtttatcaaacagattcccggtaaatgcggtcacaccattatccaggtggataaaagcggccagaattgtattcttctgtatggaggcgcaaacagaagcattaccagagaatttgtggatgaggttttgggtgcttttgaggaaggggatatcctgcttctgcagaacgagatcaatcagcttgactacatcattgacagggcttatgaaaaaggaatgatgatcatattgaatccgtctccctttgattccgctctggatgcctgtgatctgggaaaggtttctctgttcctggtgaacgagatcgagggcttccaggtgacaggagaaaaggaaccggaaaagattctggaaaagatcaaggaaatgtatcccaatgcaaaaatcgtgctcaccctgggaggagacggctctgtgtaccaggattccaccggagtgtacaggcagggaatttataaggtaaaagctgtggacaccacggcagcgggagatacctttaccggttactttatttcttctattttggacggacttcctgtagcccagggactggatctggctgcacgggcctccgccattgctgtctccagagccggagccaccacttccattcctaaaaaagaagaagttctgaattttaagcagaattaatagaaaaagaagccgtgctctcatttgtggttgagataggaggcacgaacaggcttagttgtaaaataccgccaatcatcatatcaatgtggttggcggtatttatgtttttccatggggttgacaaaccaggcagggtgtgtaaaaattggaggaaagatccggtatttcctttcttggagtgccggataaatttttggaagggagagatttcatatgcctggaatgcaaaagaagacaaagaatctggcgctggatattctctgtgacattgtggggagcatcttttattctataggaatttatacctttgctaagatgggaaattttgcgcctggcggactgtccggtctggcattgatcatcaattatttatggaaggttcccattgggatcatgacattgattttaaatattccttttgtgatcatcagttaccgggtggtggggaaaaaattcttgttgaaaacagcccgctctatgattttctgtaccgtttttctggatgtgatattccctcatacacctgcctatacaggaagtccttttatggctgctctgtattccggtgtgtttttgggagccggactggcacttttctatatgagagggtcctcctccggaggaacagattttctcaccatgacgatcaaggctctgaagccccatctgtccattggttttgttaccatgtccattgacctggtggtcattttgctgggctggccggcctttggaaatgtagatgcagttctctatggactggcctccacctttgtcacctccattgtcattgacaagattatgtacggcatgggcgcaggcaagcttacggtgatcatcaccaccaaaggccaggaagtggcagagaggatcggtgaggtgacagggaggggctccacagccatccgtgcaatgggcacctatacaaagcaggaccgggatgttctgctgtgcgcctgttccaaatcccaggccttcgaagtgcgcagcactgcccatgaggtggacccggatgcctttgttatgatcacggagaccagtgaagtattcggggaaggctttattgaatcctaaaataggtaaaagtccatgaattcctcaatgttttcccacattggctgaagagtatgatataataaaaaatattagatcgtgttattttcccactatttgatggaggctgaaaaatgattatcagtgacagtgctttaatggaagatgtgctggataatgcccagattggtctttggatgatccagctggatgtaggccaggcacccagaatgtatggtaataaaactatgatgcggcttttggggttggacaagaatcccacgccggaggaatgctatgactggtggtacagccgggtggaggcggaacattatcctgtggtcaacgaagctgtagaccagatggcaaagcagtttacggcagaggtaagttatacctggaatcatcccaagtggggaagactgtttgtgcgatgcggcgggaccagagatatgacttattccagaggtgtgaacctgcggggatatcaccagaatatatccaaagtggcccagctggagagagagaaggaagagctggtgaagttcaaggaagccatgctccaatctttgaaaaatttgttctacacagtgtggatcctggatcttcaggaagacaccattcagtttctccatacctctctgccctatggagatgaaaattatgcatccatgaccattcaacaggtattggagcgggcgggtagatttatctgtatggatgacagagagcggtttcacagagaaatatctttggaccatctcaaagtccttgtggatcagggggaatccagatttgtgggagaatatcggagaaagatcggggaccagtaccgctgggtaactgtgaccatctatctggtgcaggattccaagatcccccggtatgccattttagctgtccaggacgtggaccagcagaaaaaaaaggatgagaagagcaaggaggctctgaaagaggcctatgatgcggctaacagagccaatcaggccaaaagtgagttcctctccagaatgagtcatgacatccgcacccctttaaatgccattatgggtatgacgaccctggccagagtgaatctggatgacaaggactgtgtgagagagtgtctggaaaatattaaggatgcaggggaaagcctgaaggccctcacagactccgtgcttgacgtgagcaagatcgagagtgggaaaatagagctgaaccaggaagctttcagcatggaaaagctcttgaaaaaaatagtcatgctccttcagtcagctgcaaaagccaaggaccagaaaatctgtctggatatgaagaaactcactcacacccaggtgatcggtgatgagatcaggctggagaaggtttttctgaatatcctcagcaattctgtaaaatatacgctggaaggggggaccatccagatcacagccgtggagatgccttgccttcagaagggatacggcaggtaccagattcagttcaaagacaatggaattggtatggacaaggagtttttggaggtgatctttgagccttttgcaagagctgacaactgtgttgtgagaaaaacggaagggtccggtctgggaatgtccattgcctataatatcgttaaaatgatgaatggggagctgcaggtggagagcagacctggggagggttcctgctttactgtggatgtgaatctgaagtatgtgctggaggaagtgcccagggagcatgtggatgaggcggtccttctgcagaataccagcctggattcttgcaaggttcttttggcggaagataatgagctgaatgtggaaattgtacgttccatgctggagcttctgggcgtggagtgcgaggtggcctgtgacgggattcaggcagtagagctttataaaaaatatgaacctgggtattttaccataatcctgatggatattcagatgcctcatatgaacggatatgaggcggccaaggcgatccggcaatcaggaagaggagattctctaagcattcccatcattgcactgacagccaatgccttccaggaggatgtaagaattgccacagaggtgggaatgaacggccatgtggctaagcccgtggatgcccgcaagcttgtggaaacgctgcaggaattcatagaaaaatagaggagccgctttggaaaaagatttaggaattttggaaaaaattcgctttttttaaaaaaagacttgttatttccgggccgatatggtaatatacatatcggtcaagaaatgcgccgatgtggcggaattggcagacgcacttgactcaaaatcaagcggtgaataaccgtgccggttcgagtccggccatcggcagctgaccagactcactcaatcaggagtgagtctggtcctttttatgtgcagaaaagagccattggccggctgcaaaattgtcagccggtccaacagctctttgggtcttcttatataatctcctgtcagcttttcatcttaccctaaaatcaaacatcgtttgtcctgaaacgaattttacagttacgactggggctgcatggtaaagtattccacatacagatccataaagtgctccacatccatatcaagaagaacttccaccttctttgccaggggattgataacgaaatcatctggtcttcgtggatttgctttatacccgatggcacgtccgtaattcatgcccatggtggtatcaatgtccacatacctttcttcagatgtggtcacaaaagagggatccaaaagatacagtaccgttacttcatcccaaagagtatttgtatattctggattgttttcatggttgggtcctgaaatctccataaacaatttcgttgcataggtttccggagcagccttgattttttcgtaggtatcataggtaatacgtgcttttgcacaaatatcttttggtacgatcacctggcgggcaaaatcgctgttcaggcagattttgatggcttccgggtcagcccaccagttaaattcagcggcagaggtggtatttcccgggacgtcaatggcgccgcccatataaataacctgttttaccagaggcacgatctcaggataacgcttcacggccatagcaaggttcgttcctgcgcctacacagatgagggtgacttctcctgggtattttttgacttgttcggcaataaaatcaacggcatgaccctcctgaggttttgtctggggatagccgatgacaggttcttccggaaggttcaaataggaatccgggcggggccctgacatatagccaatattgcctcctacaatacctgtgagcataccattttcaagatagggggtatgatcgcccatcaagggttcgcccatacccatatatactggaatatctgtccgtcctgccagctcaagatgccggagggtgtaagcggtacttgcctctacccaattgtttccaattaccgtagtaatgcctaatagatcaatttttcctgaattcagcatcatgaacaatgccttggtatcgtctccgaagactccgttgtctgtgtcaaagataaccttcattttttcaggggcaggagcttcttcctgggctgcagcaaatgttcctccaaaggtgagcattaaacacagtgtcagcagcatggtgatttttttcttcatagcaaacctcctttgtatcgttttgtcagtggcttcaataatgaaatgctttaaagggaatggtacacagccagtaaaatgtactgaatgttaggatcattatataagaattttgttaaacgcatttcatttatccggattatacataaatccagggagcataacagtgatacatatcacaggattccggttatgctatttctttttatgggtatcaggtttcgtataaggcagctatattacatatcctgcgttgtatttctttacggatatgggacggctctaaacactggcatttgtccccaaagttgagaacaattttccttaaaagacttgttaagttaggcgatcccgcctattatccctgaggattggaaaacaaagcgatattgggcggataataagtaaataccagaaaagcaattgccagagcagcggccaggaatacgaaactggctgtgaatcgggcaattttttttgatttcagtccttgatacaatgctgaaaatgtaaggagcacactgaggaaaaaaactgcgatatccacaggaagaagattgtagcccaaaatccccgtataggtataaaacagcacaggaacagccagggcacccagcaaaagggaagcggcggcggccccggtaaaatgagggaactcttgccccagcctgcttttcatgaaaataaaatacagcaatgccggaaaatacacaagctttatgtgttcccaggtggattcacttacagggcagaacagttcaatgataaaattcctgccagaccactcataacaaaagtggagcagggtccctaaaacagatacaaacaagataccaagcaacgttaatcgttttaatttagtcatattcatcacctggtctttagtatgcgcgttgatcttggtttttatgcctgcagatcattgacggttttgggaagcagaaagctttgcccgatattccaaaggtgcgcatccaaaatgcttccggaaggtctcagaaaaatagctggttccggagaatcccacctcatagctgatttcagtaatattcatgtgggaagcggacatcagaccgatacttttctgcagccgatattcgatcacataattcatgggcgttttatttaaatatcttcgaaaagaggaacagcatttgcttttgcatacatggccggcagcggcaatgtcatcaagggtgattttttccctataatgttcttggacaaagcggaccatggcccttacagaagaaagctgatgggaggattcacctgccatctgaggactatcaggggcgttgttatacagctccatccagatttgatagaacaggctttgaatatggagctgaggcgccttctggtcaaggaagaaggataaggtgcacacagcgtccaaaatccgcttttcccagggaacactcttgtgcagcacccaataggaaaaagcttgattcagtaaaacaggggtgatataggtctgttctatctgctgggtggcacacagcaataaggggtgaagtaaaatacacagaaattcacattctgtctttgtgtcagaaaagccatagtgaagctggcaggcatttatgaagatcccctggccttcattcaatgtgaccacagcgccgttaatattataatccattgtgccggagaggattaagatcagctcaatatcatcgtgccagtggctgagggctgcatagttgggatattgggataggagccctctttgaagatgagcggcatagtctggatagttgtaatacacattctcggaaaggtcttcttttagatcaatgaaattacttatcataggttctctcctgtatggaagattgttataactttgtggatgatattgaaagaaatggatagctctttacaatataattatgtctgagaaaagaactgctgtcaacaacaaaaaaggaggagccttccctatgaaaacagaaagaaacgaacaatacagggagtttaatagaaaattagtgagtcttgtttttcccatagcctttcagcagtttatgctggcccttgtgagcacctgtgacgcagttatgctggggatgatcgatcaggattctctgtcggcggtatctttggcgggtcaggtgcagtttgtgctgaatttgtttctggcagccatgaccattggcgcaagcatgtttgcagcccagtattggggaaagggggacagagatgctgttgaaaaactgctggccattgtccttgagattaccattgctatagcagttgtcttttttgcctgtgccctgttttttccggagcagatcatgaaaatatttacctcccaggaaattttaattgcaaagggcgctatctatttaagagcagtggcaccttcgtatttcctgtgcggtgtttcccagatttatctgtgcattatgaaaaacagcgggcaggcattaaaaagtaccataatcagtacaggggctgttctggtgaatattgtgctgaacgggatcttgatctttggcttgtggggagttccagccatgggagtggcaggggcggcttatgctactgtgctggcaagaattttagaactgctgtgggcctttttggattcttatggaaaaaaggatggaatccgggcaagactgaaatatttccggcataaggatgtgtccttacaggaggatttctggaggtatactctgcctgttcttggcaatgaactggtgtggggctgtggctttaccatgtattctgttattatgggacatcttggaagtgatgcggtggctgccaactccattgccaacattgtaaagaacttaatggcctgtttttgtcttggactggccagcggcggcggtattatggtgggaaatgaactgggggcaggcaggtcctgcaaggccagggaatatggagccaggctgtgcagactgtctctggtcagcggctttgtctcaggtcttgtactgctggggatcagtccgctggtcttaaaatgtgtcacactcacccctcaggctgtggtatatttgaaatggatgctggtggtgtgctcctattatatgatcgggaaatccataaacagcaccaccattgcaggaattttctgcgcaggaggagattcaaaatttgggcttttgtgtgatacggtcaccatgtggtgcattacagtacccctggggcttgtggccgctttctggctgaagcttcctgtgccggctgtgtattttattatcagtctggatgagatggtgaagcttcctgctgtgtataagcactataaaaaatatctttggattaaaaatctcactgttaagccagagtatgactgtgtccgggatctgcccaactgcagatagaagagcggtgccgttgttagaatggaaggagaggatagaaatggatatgaaagaaaaaatgcacaatggaatgttgtattttccgggggatgagacaattatggaggaacagtccaagtgtctggacagactgtatgattttaatcacactcgtccaagggaaatggagaagcgggaggcacttttagaagaaatgtttgctgagattggtgagaactgctacattgagcctcctctgcattccaatttcggcggccgtcatgtgcatttcggaagaaatgtgtacgcaaattttaatctgacccttgtggacgacacccatatttatgtgggagattataccatgtttgggccaaatgtggtggtggcaacagcaggacatcccattgatgcggcccttagagaacagggctatcagtacaatatgccggtccatattggaagaaactgctggattggtgcaggggcattgatccttcccggcatcaccataggggacaatgtggtgatcggtgcaggcagtgtggtcacaaaggatattccttccaacacccttgctgtggggaatccatgcagagtcctccgggaagtgaatgaccatgacaaggagtattattttaaggaccggaaaattgatcacgaacaattataaagattctgcggtagcaggaaaaaagccggaaccaaggggcaggcagctttttacaagagacaggatgatatttctcccaagagaatctcatcctgtctttttatggaaaacgaaacagaaaaaaatttcaaataaacagtatataacagttgacaagtgttatatactgttatatactgtttatagaacaggaggaaccccatatgaagatcatcataaacaactcttcccaacagccaatatacgagcagattgtagagcagttgaagtctcttatcatcggcagtagtttggcggaacatgagatgctcccttctgtaaggtctttgtccaaagagttgaagatcagtgcactgacagtaaaaaaagcctatgacactttggagagagaaggctttgtagtaaccgtacatggaaagggcagcttcgtggccagcaccaataaggagctccttatggaggagcaccgcaaagaggtggaagctgatctggaaatggcagtattaaaaggtaagcgctgtggtatgacagaggaagaaatcagagaattatttgaacttgtgatggaggaatgacaatgctggagttaaaaaatgtgaaaaagcagtataacaaatttaccctggactgttccttaaaggtggatgagggctgtattacaggcctcatcggaaaaaacggagcagggaaaagtactacctttaaagcaattttggacttgatcaaaatcgaccagggagaaatcttcatcctgggcaaggactacagaaagattaccctgggggataaggagaaaatcggtgtagttctctctgacagtggattcagcgaatatctcaatgtgaagggaattgtgtccattatgaaaaatctgtaccatgcctttgatgaaaaggagtttgtacagcagtgtgcggaatttgacattcctatggacaaaaaactgaaggagttttccaccggtatgctggcgaagctgaagcttctcacagccatgagccacgatgcttccctgttgcttttagatgagcccacggcaggactggatgtgatcgccagggaccagcttctggatatgctgagaaactacatggaacaggacggccgctccattttgatcagctcccacatttccagtgacctggagggtctgtgcgatgacctctacatgatcgacaatggaaaaatcgttcttcacgaggagactgacgtgctgctggatcaatacggattgatgaaggtggatgaagcacagttcaggaagctggagaaacgctatgtcctgcggatgaagaaggaaagctttggttatagctgtctcacgaaccagaggcagttctatatagagaattaccctggaatagtagtggaaaaaggaaatattgacgaagtgatcaccatgatggttaagggggaacaattatgaaaggtttgcttgtaaaagacatccaattattaaaaaattctgttaagcttttagtaattatggttttaatgattttctttttgctgtctgtgaacaaaagtactatagacatggtggggtttgtggttggctatggaagctttctgtcatgcatgcttgtgctgaacaccatcagctacgatgatttcaacaagggcctgagctttctatttactttgcctgtatccagaaaattgtatgtgactgagaaatacatttttggtattatcactgggattctgggctggattgtgagctgtgtctgtgtcaccgcatttttggcgttccgttcctctgatgttccgtggagagaagtggctttgatttttggtatatttttgatttttattttcctgatcaactccctcatgctgcccttacagttaaaattcggcggggacaacggaagaattgctttgtttgtggttgtgctgggcgtggcggccatgggctttctcattcagaagctatccgaaacctttcatctggatcttgggggaatgttacgccccattttggatctgggcacaacagccctggcaatgggcgttgtagtcataactgcagtgctccttgcagtttcctttggcataagcactcgaattgttcaaaataaacagttttaaattctcataatatttggtaagatttccttaagacgaaatctgcgaagacgtctgcttccggttctgtttacagagccgggagcagatttgcgtatagaaaggttaggcgtgaggaccatggataaaatattagtagtagaagacgatgcaggggtgagagaggagctgacaaagcttttaagagccaatggatatcaggtggtaaaggagcctccctgtgacttggcccttttggatgtgaacctgccgggggagaatggttatgagatctgccaaaggcttcgggggtattcagaccttccggtgatctttctcacggccagggaacgggcggaggatgagcttctggcttttggagtgggggcggatgactatatccgaaagccttaccattcctcagtgcttttggccaggatcggccgtctgctgaagcggaaaaccagccctgtggtcacttcccatgagctgaccttgaatcttggggatatgacagtgagttataaagaaaatagagcagagcttacgaaaaacgagaccaggattttgtactgccttatgaaaaaggagctgtgcacccgccaggagatcattgaggatctatgggaaaacagcttgtatattgatgagaataccctctatgtaaatattaaccgtcttcgggaaaagctaaaggggctgggagcacaggatttcatccgtaccgtgcggggcgtggggtaccgcctatgaaatttttttcatttttcctttcaaaaggggtgactctgtgttttctgggaatcgggggaatcctggcaggtgttttacttctgtggtcaggggcgccgccccagatgatcctgctggcagagcttatgctgctggtattgatggttctgtggcttggatgtacctatgtgattcagtccaaaagactgaagcggttgaacagactacaagagcaactggaagaaaaatacttgctggggcaggttcttccaaaacccatggatggaatggaatccgagtatttttatattatgcagaccatttcccacagcgccctaacacagttagaaaagacaaaaagagaaaagcaggaatactgtgattatgtggagagctggattcatgagatccgcacacctcttaccgcctgttcccttatcctggacaatgacggcgatcccatcaagcttcgcagggagctgaaacgggccgagaatcttacagagagtatcttgtactatgccaaaatgcgcacagtacaaaaggaggctcagattcagcaggtacagatccaggaggtgatccacgaggcagtgaaaagtcagatgcatctgcttctggctgcctatatccaggtagagattcagggggattttctggtgtccacggacaaaaaggccgtttgctttatcttaaagcagcttttgatcaactgtgccaagtattgtcccggttgtaaaattactgccacagcccgggaggggaaggtgcaggtgagagataatggggtgggaattgccgctcatgagcttcccaaggttacggacagaggctacaccgcccaggctggccgccgtctgggcggaagcacgggaatgggcctgtacattgtaaaagagctgtgtacccagcttggaattggactggagatttcctccaggcagggggaatacacctgtgtcagcctggattttggccaaaacaggccggccggggaccagactgttccacacagataggggcagagttcctttctctagagaataccttacaaaaatgttagaaaacagccattttgccgttagatagaatctgagaaagctgtgctatacttaaggtgaaatggagggaatgcttatgaacgagattttacaggtacaggacgtagtaaaatattatgggagcgcaaatgtggtgacaaaggccctggacggcgtgtccttccaggtggaaagaggagaatttaccgctattatgggagcctctggaagtggaaagaccacccttctcaacgtgatctccaccattgaccggatgagtgggggaagcattgtgttggacggaaaaagtctgtcgcagatgaatgaaaaccagttgtctgactttcgcagggatcacctggggtttattttccaggattacaatcttctggataccctcacagtggaagaaaatatcacccttcccctgaatttgagaaaaataggggaaaaggagattaaaaaacagctggacaaggtgattcacaccttagggattgaaaaggagctgcacaaatttccccgggagctgtccggaggccagaagcagaggactgcctgtgcaagagccctcatcgcctccccctccctgatcttggcagatgaacccacgggggctttggactctgccaattcccgtatcctcatggagacccttcttatgatgaaccagtccctgggctgtaccatcctcatggtcacccacgatccagtggtgggctcctatgcccgcaggattctgtttttgaaggacgggaagatctggagtgaggccaaccggggggaccgggaccgacatgccatgtacaatgagattctcacggtgatggcagcgctgggaggtgagggttatgttcactaagctggctatgagaaatgtgcgcagacagattggaaattattttatctattttattaccgtggccatgaccgttgcctttatgtctgccttgaatcaggtgatttataatgaacaggtccagtcctatgcagtttcagggcaggaatttcagtttggacttcggatgcttaccttttttatcacgatgatcgtggcctttgtccttgcctatgccacatcctttatggtgaagcttcgcaaaagggaatttgggacctatcttaccctgggcatgcgaagaaaagatattctctcaatttttttcaaggagaccatgcttttgtgtcttattgccctggggataggaacggctgcagggatgtttctctatcaggggatgatgattctgctggctaatctcatggagatggattattcctttgcctcctattccatcaaagggctgctcttcacagggacaatggtggcagggctctttttgctgtccagcgtgggctcggctttttatcttcggtggatttccgtttatgatctgatacatgcagagaaaagaaaggaaaaggtggtgcgccatccttatttgtggctgggaattgccattctttctcttggcatgatggcggcaggcggggtgttgtgttaccaggggctggatgatatgctgcatagccttcttggtgcccagaatgccaagataaacagtgcattgtttgttttttccctggggattattgggtttcacgtgagtatttccaagagcatcgtaaatattcttttgagaaataaaaagctctgtgcaaaaggaaccaacacctttttattccggcagatggcaaaaaatctgggaatgaactccgtgatggcgggaattttgtcctttcttatttcttttgctgttattggggcaaactgctgctttttacagaagaccatgggagagatggacctggacagaacctttccctttgatatttttgtgtgcatagagaaggagggaactgcagggatttccctggaagagggggaccggatcattaaggagcacgcctctgtagaaaaggagattttctatgatatttatacggacagggacaaccgactgtatcgtttcactctgtggaatatggaggaatatgccagccttccggacacctatctgaaagaaagcgattttaaccgtctccttgagcagctgggaagggagccgatatccctggaggatgaatttctggtgctggccaatactcctaggatcatggccgcggatttttcaaaggcccagctggactttaacggaaaaacctacacctgcaagggtaagaccgatgccctgcctctttttgcttattactatatgcttaccgtgatccccgatgaagctgcccaggggctggaggtgtactccaactgcagggtatatgatctggaggataaaccttatgatgcaaaagcactgaataaggcattaagttacaatgaggatcggtggagcggggaggaatatagtcaatcagattaccagctgcgggaaattgggcggatagagcagaacagcaccacatctgtggtggttctgggaattttatatgggtccattctctttgtgttcatggcaatggcggttctggccctgaagatactttccacaataccccaggagcgcagaagctatcaggtgctgtttcagctgggggcttccaggagagagggcagaaggaccttgtttcgggagatctttgtattctttttccttccctttgccattcctatgcttatgggatttcctacagcttacctgtgcggctggttcatggaagcgtccggatatcagggaatgtccgcggatacaggaagaaatgctctgggtgtggcacttgtcatggcggcggcttatattttgtattttacagccacctatctgattgccaggagaaatattatggaagaagaaaagatataacaaggaattctggaggaattttttcctttagaaaaattttagatgtatcgagggcaggattgttgtataatactggtaagtccatacaacagccgggggctgttcctggaagggaacggaagtaacgaatgcgggcggcttagagagccgcagcattttgcctgagcttatgtgaaagggaccaagaagaggtgagaggatggataccagctggctgcatttactgccgctgctgatgctggtgctggttttctggttttcctggtattatgcagaagggaggggctgcttgaaatggtctcccttcctgatgacctgcacaggaaagacacatccggtgtacagacactatcaggtgcgtctggcaagacagaatctgtattcctatgataaatatgaaatctggcgctatatagaacggcgaagagggttcacggaaaatccaaaagaataaagattaagaatggaggatttcagtgaacgaactggcagtgatttttaaacaggtgatggactttatttatggatttacaggggattacggagtggctattgtggtgctcaccattgcattccgcaccctgcttctgcctttgaacagcaagcagaggaaaagtatgaaaaaacagcaggagcttcaggtgaaggtagaggagctgaaaaagcgctatcaaaacaatgagaagaagcttaaccaggagctgcaaaagctcatggcagcggaaggaacgggcagtatgggatgtcttttatcatttctccagcttcccttgatggcctgtctgtatcaggcgatcaggcttaccattgcagcgggaacggccactgtgctgcttccctgggtcacctcccttttggtgagggaccagaccttggtgcttcccatactgacggtggtcattcagctgctgcctcagaccttcccctatctgaagtttttccagggactaaagctgcagaaatccagtcccgccatgatctttgccatggctgccatgaccggggtgattgggatttccctcccctcaggagtgggtctgtattatttggtttctaatgtgtacagtgtgtgtgagcagtttataggccacctgctggcagtgagaaagcaaagagttctggcataaataagtaaataaaaagtgcccgggttcctgtgatgaaccctccgttgcctgttggaccatcaggcctgacatacgggggtggcagcagggacctggggtacttttttattacatatgtaataaaaatcctccgggggatgaagcagctttcccaaagtgacctggccaagctggccctgatcctgtgcattgcgttggataaaaagtttgaggagcttttctattttgattagagggagaaatagacaggggaagaagtgcaaagatgaacggaacaaagagttttattgagtgtgtgggattggattcccacggaattgaaagataaaggaaagaaggattaaaaatgggtcatttgacaacaagggatgcctatcagaacttaagtgacagaattaactggtttacccagggggcgcctccatcagagacgctgtacaaaatcctgcaggttttgtacacagagaaggaggccaagtgggtggcgcttcttccggtgaggccttttacggccaagaaggcggccagaatctggggaacaacggagtataaggcagagcggctgttggaccatctgtgtgagaaagcactgctggtggattcctggcacgacggagtccgcaaattcgttatgccaccgcctatggcaggctttatcgagtttgcacttatgaggaccagaggggacattgaccagaaatatttggctgagctatattatcaatacatgaatgtggaagaggactttatcaaggacttgttttgggccacagagacgaagctgggcagagtgtatgtgcaggaaccagtgctcaccaatgaaaaggccaaccacattctggactatgagcgggcttcccacattgtggaggaggcagagtacattggactgggcctgtgctactgcagacacaaaatgtaccatgcaggccatccctgtgagatcaacgccccctgggatgtgtgccttacctttgacaatgtggccaggtccctggcagaacatggggactatgcacggctgatctccaaggaagaggccatggatgccctggaacgctcctacgcgtccaaccttgtgcagatcggggaaaatgtaagagaacatccggcctttatctgcaactgctgtgggtgctgctgcgaggcccttcaggcagccaggcatttcagccccatgcagcctgtggccaccaccaactatattccggagatctccctggagaaatgtagaggctgtggaaagtgcgccaaggtctgtcccatcctggccatctctatgaaggagggcacagacggcaggaaaaaagctgtggtggacaaggacatctgtctgggctgcggggtatgtgccagaaactgcgcagccaaagccattgaactgaaacgaaggccaaaacaggttatcacgccggtgaacagtacccaccgctttgtactccaggctattgaaaagggaacgctgcagaatctgatttttgataatcaggcctttgccaatcacagggccatggctgcagtctttggggtgatcttaaagctgcctcctttgaagcaggcgctggccagcaggcagctgaaatccatttatctggataagctattgtcagtaatggataaaaagaagtaacacgccctgtgcagcagctttgtgtgaaacagcccggctgcatatggctttaggaaggaacacaagatgaaaagactcaaaaaaatactgttaattgtggttggagctatggtgttggcggcggctgccggagggatctggatttattcaagccccatgcccctggttctggctcttcgctatttatggggcggtgatgcccaaatcctctatccccaggggtatgatccggaaacagacgggatccaggtggtgagggacctggagtatccctcaaaagatggcagaaatgcttatgatctctatttgccggaagaggcctctgatcctctgcctgtagtggtgtgggtccatgggggcggatttgtggcagggagccgctctggtgtggagaattggggaagaatgctggctggagaaggatatgccgtggcggctgtggattatcagtgggcgccggagatcacctatcccggacaggtgcgccaggtggaggagtgtcttgcccatctaaaggagcagacccagtatcctctggatatgggccaggtgatcctggcaggagattctgcaggtgcacacattgcggcccagtgcgtccttctggcctccagcccaacgtttgcccaggaggtggagctttcatccgccctggagcttggtgatattcaggcagctcttttgttctgcggtccttatgatgccaaggagcttttgaatgttaaggatcccaagctgggatttttcaccaccaggattggatggagtatgtttggaaagaaaaacttccaggacatgcccctgctggcagctaccacggtgggagcttatgtgaacccggatttcccgccttcctttgtcacagacggcaattccggctcctttgaatcccaggggaaggagctggtgaagattttaaaagagaaccaggtaccctgtgaggagctgttctttggactggaggaaggagccatcacccacgaataccaggcggacctgtccagcgagcagggatatctgtgctgggaacgagtgagagagtttttgagaaatattaaaaaataaccccctgggtggcttgtatttgccccaaagtttgataaaataatatcaacagcacagagcttgtgttgcaaagcactcattagcagcatgtcagacctccaaaatttagacatgcgaaaggttagcgatcttaaatatttatctatgagacaggcagttatagacaagttgactatagctgcttttcttattacataggaaagttcttagaactttcctatgcaataaaaaccctccgggggatgcacacaatgtgccagggaaagctgctttgcagctgcacattggcgcacaaagctaccaagcccctcatgagtgaggggatggggagttgaagcgggcttgtccgctttgttgttgcatagtgatctgacaacaaaagaaactggaaaattgccaatgatcacttgatacaaacacaatttcagcaggcatggtatttctattttctatatgataaaatagagttcggcagaaaaaaacattggcgcttaaagaaaaggggattttcgttctggatgcgttggatatccgggaatatataagaaaagatgaaaaccgctctttggagcaagaattaagggaataggagatagaaaaatgacaacattaaaggaactgtgtgagaacatcaatcttcagaaggaaatggaacaaaaagttctggattgttatgatgaaatggacgaaaagtctttgaggccttatatggaccagcttttttcaaaggatacctgggaggaaggacgtgctgcccttcgcaaagccttggagccggatccttgtggggtgaaaattcttacctgtatgctcctgtgcggtttgaaaacctggaagctgtatgaggaggcaggaatttcaagggagatttttgtggataccttccggtgtttcccaagatttatcggggaacatcttgccagctactccagtctggggtttgacagagatttctggacctccagacagattgccatgagacttttccggattggggagctggagtatgagcttgtagaggaaggggggagcaggaaggtgagtcttcatatcccatctgatgcagggattcagatagaaaaggtgaggaattcctattggagggcaaaagagtttttgaaaaagtattttccgcagtatgagaaggcacctatgatctgtgaatcctggctgctggctcctgctctgaagcaggtacttccacaaacctccaatataataaagtttcagaatctttttaccattgagaaggtgctggaagaggatacagagtatctggaatgggtgtttaaaagaaaagaccttcctgtggagcagcttccccaggatacctcgttgcagcggaatctgaaaaagtttcttatggaaggcaataaggcgggggccgggatcggcaccctcagggaagcgtgtttatgaaaaacgggagattatttcagattttatatcttttaatggagcaccgggagttgacggcggtatggctggctcagaagctggaggtgtcggtgcgcaccatctacagggatgtggatgctctgtccgcggcgggaatccccatttatacccagcagggccagggaggaggcatccgcctcatggagcagtttcagatggaccgttctcttctggatgaggaggagcaggaaagcatccttacagccctgcagagcctggaagctgtgggggtggtgcaggaccgggagatcttgtcccggctgtcagccatttttcggaaaaagcctgtggaatggctggagattgattttgagagctggggcagcaaagagaaagaaaaagagcattttgatctgtgtaaaaaggcaatcttcacccgccatcttttaaaatttacttactataatgccatgggggagacaaaggtccgcactgtggagcctctgcgtctgtgctttaagggcggaaactggtatgtgtccgcctactgcagggagaaggaggattaccgcctgttccgtctcagccgtatggaaactccccagctgctcacacaaaggtttccggagagggaaatgcctcctcaggagaaaaaggatgccaagattcccggtcctttcattcccatggaattgaaatttactgagaatgttgcctaccaggtgctggatatcttcgatccccaggaaattctaagactgccggagggcggatttttggtaaagaccccttatttggggaaggagtggaccgtaggatttctgctttcctttggaaaggagctggaagtcctaagcccagactgggtaagggagcttttggcccaagagatcaggaagatgaaagagatttatgaaacatgacatgagatgtcaccttccctgttatatattaaataaaaaaggagattcacacatggaagaaaagaaattttgtcagagctgtggcatgcccatggagcaggacggcgattttggaacaaatggggacggcagtgtaaatgaggactattgctgttattgttacgaaaagggtgcatttaccaatccctcttcaactatggcggacatgatccagttgaacctgaagtacaatgaagaaaacggttatcctatgggtacaacggcggaggcaaaaaaagtcatggaggagtggtttcccacattaaagaggtgggcggactaagttttgggctcccatgcaatgcgatttcgtatacaccagaaatacaaagggcatagtaacatctgtatcagcaggaattaaggcaggaagtcttcggttctgtggctggcagaggctgctgtgcttttttattacacaatgtgccagggaaagctgccaagcccttcatgagtgaggggatggggaggggaagcgggcctgcctgctttattctgtacatccaagcctaaatgcgatataatagaaaaatcttcggagcagtgttctgctttcagagaagatagaaaataaaaagatactaggggcagtgtgcgcctgaatatataaattttttgaggatgtgtagaatggttagtggaaaagaatacctggaatttgtattagaaaagctgcgggacagaattgagaagatcaatctgaccattgatgaagggcagaaggaaatagagggaatgcatgagtattactgggaaaattacgcggagatggaccagtatggatatgaggattttgacaaccgccaggccttgcttgcccaggtgaatgccaaccaggagcagctggtgctccggcaccggtttacgaaaatgctggactccccattttttggacgggtggattttctctatgagggagaggaggagccggagaccttttatattggcattggaaattttgcccagggagcagggggaaggcctttgatctacgactggcgtgcccctgtgtccggccttttttatgattatgacaaaggacctgcttcctatacagcccccatgggtgagctgacgggagaaattaccacaaagcggcagtataaaatccgcagaggacgactcatctatgagtttgagagcgatgtaaagattgatgatgacattctcaaggaagagctgggaacccacggagatgtgaagctgaaaaatatcatccgcaccattcagaaggagcaaaatgctattattcgaaacacccaggaccggatcttggtgatccagggctgtgcgggaagtggaaaaacctctgtggccctgcataggatcgcctatcttttgtatcatgacagacagaacatgaaatcctccaatgtgctgatcctttcgccaaacagtgtgtttgctgattatatttctcacattctgccggaattgggggaggagaatattcaggagatgagctttgatctctttgcctacagagagcttctggacacggtttctgactgtgaggaccggtatgaccagattgagcggtgcctgcgctccccctcccgtcagaagcagtatcaggagaagcagtctgtggcctttcttaatgagatggaaggctatattctggagctggaggacagcctgatgaatttccgggaagtggttctaaagggctttgtgaagacggagtcagagatcattcagctgttttactacaaatttatggaaatcccgctgctgtccaggatggaagcagtgatggaatattttattgatgagtatgaaaccctgcggggcgtggagcttacagacaaggagcaggccgctgtatatgaaaagtttatgggaatgtacgagacaagggatttgtatgtgctttacagccggtttctggagcagcaggggtacaagaagcttcccagggtttcccaggagaaaagaaggttaaagtatgaggatgtctatcccatgctgtatatgaagtaccgcctgttcaaaaagcagggaaacaatcaaatcaagcatctggtcattgatgagatgcaggattattccaggatgcagtacctgatcctacagaagctgtttccctgtaaaatgacgatcttaggggacaaggcccagaccatggatgaagagatacaggatgttctggagttccttccgaagatttttggaaagaatatacgaaaaatcctcatgaacaaaagctatcgaaatacggtggaaattgcctcctatgccaatgagattgccggaattacagatatggagctgttccagcgtcatggaaaaccggtggaagaggagggctttccggagctggaggaagccatggatgcagttgtggaaaaactccggcttggggaagaagcttatgagacagcggctgtgatcaccatgacccagaaggaggcccggcaggcagcagagcttctgaaggaaaagcttggctccacggcttttgatgtacagaaccagcttacttatgtggacagggacagctcttcttttaaaaagggtcttaccgtgaccaccttctatctggccaagggcttggagtttgatcaggtgtttgccctttatagggagaatgagcacaatcctcttctcacccaggccaaatatatctgtgccaccagagcacttcatgagctgtacatgtattgcctgaagcactgagtaagggaagaaaaaactgccggaaaaggtgtatgacaccgccgggatgggaaaggctatatcttgacagaggctatggagggtttaaacccagagcactgccaaagggaaagcaccaaggggtttattccttattcagatagcaggaaggggacgaaagactttatggacaaggacagggagctggaggaaatcctggattattatggaaaacaggcaggaaaaatcagccaggaggaacaggtggagatgcttcgggagatacagagtctttatgactgtatccctgatttttccagagagagggctgcacaggctctgggagtgaaaaagtcttatctggactgcctggtgcgcatgtatcccagcctgaaggccaagaattatgagcataccattgtggtgtgtacaggtcagcgatgcgcccgaaaggacagcacagagattgtccagaagcttcaagcgctttttaaaaccggtaaggacggtatatcaaaggacggaaaggtccttgtgaaaacccggcactgcctgaaaaactgtgcccaggctcccaatgtactggtggacggagagatttacggcaatctcacagtgcaagccctggaacaactgcttggggaactggggatacttacgaaatagacctgctcttgacaaagaaaaaggtaaatgatagactaaaattgctcatcggagggcttgtgatcgcaattacaaagctggagaagatgtcgggtggcgcccggtattctccggcttttttggttgcaaaggaaagtccatagaactctcctttacagtcaaaaaaagtcctccgggcaggagcttttctgagtttgcaaagaacaaagagggaggttttttacaaatgaacaaaaaacaaagctttacagaaggaaaaattttatcccccttgatccgtttcgcgcttcccgtactggcagccctgtttctgcaggctatgtacggggctgtggatcttctggtggtggggcagtttggcacagccacagacgtgtctgcggtttccacgggaagccagatcatgcacaccatcaccattgtgatcgtggggctgtcaatgggaattaccatcctggcaggacagaagatcggtgagaagaaacccaaggaggcgggtagaaccataggcagcggcatctgtctttttgcggtgctggctgttgtggtgactgtgctcatgctggcaggagcgaagggactggccgctttaatgcaggcacccagggaagccttttcactcactgtcacttatgttaggatctgttccgcaggaactatatttattgttgcctacaacgtgctgggaagtattttcaggggaatcggggactctaaaatgcccctgatcaccgttgccattgcctgtgtgctgaacatcgggggtgaccttttgtttgtggcagttttccacatgggggtggcgggaaccgctctggccacagtgctggcacaggccatcagtgtggtcatatctgctgggatcatccgcagatggaccctgccttttaccttttccagaagctatatccggtttgacaaggacctgatcaaacggatcctgaccctgggaacgcccatcgcccttcaggacctgctggtgagcatttccttcctggtgattcttgccattgtaaattctctgggtctggtggcctcagcgggaatcggagtggctgagaagctatgtgcctttattatgctggtgccttccgcttttatgcagtccatgtccgcctttgtggcgcagaatgtgggggcgggtaaaatggagagggccaacaaggcactttattatgggatcctcacatctgtatgtgttgggattgtcattggttatgtgtcctttttccatggggatctgctggcgtctatttttgccagagacagtcaggtgatcctggcagcggcggattatctgaaggcctatgccatagactgtctgctcactgcatttttgttctgctttgcagggtattttaatggatgcgggctgacctttttcgttatgatcgaggggatcattggggctttctgcgtgagaattcctgtgtcctttgtggtgagccgtatttctggtgccaccttgtttcacatcggcttggctaccccggcatctaccattgtacagattcttttgtgcgggatttattttaagatccagatggataagcggaagaaaaaacagcttacggcaggcaattaagaacacagaaaattcacgaattacacaaatatttcacaggaaaatccttgcctttttctggaattccatataatcttggattaacgaaggtaaggggcacagatacaaggtccctgccagaagaaaagagagaagaatagggattcggccctttgcggcaaatccatgttggaggtaaggaaaaagatgaaatttaagaaattaacggcaggtcttcttgccgccgcacttctgtgtgccacaaatacaggagtatctgccagagagggcagaggcaggtttcaggatgacagctggtccagggaggaacaggagataccagaaataccggagccggaccaggattcagactttcaggaatacgtcagtgatgagagcctgcccaaggaaaactgggtgaaggtgccgtatatcagccagaaggatattatgcccaccggctgtgagattgtcagcgccatgatggttctgtcctactatgaacagaatccaacggtccaggaggtgatcagccatgtagccatggaggatgtgacagaagatgaaaaggggaagctggtggggcccagtcccatggaggcttttgtgggaaatccccttcaagatacaggctatggctgctatcctccggtgatcgcccagatgctggaggagcttgtgccccaggagaggactgtggagatcaccactggaaaaagtctggaggaattaaccgcagagtatctgcagcaagagataccagttcttctgtgggccaccatagagatggcccagtcctatcccacggatacctggtatgtgacagatgagaacaaagaggccaccaaggaaacctttacctggcaggcaaatgagcattgtatggttttggtgggaagtgatgaagaatcctattatttcaatgatccctggtacgacaatggaattgtctcctatgagaagcatctggtggaacagcgttttgaagagctgggcagaatgagcctggtggtatattagtgtaaatgaaggcatggtctgctgctctgtgccgtttctgaagtcctctggggaggtgtcccagcagggagacgggaacacagggctgggccatgtctttttacgttgtatctctatttttttgtcaaaaagggttgactctcacgcagcgtgataagttacaataggagtgaagatacagcaaaggaagccgcggatcctttggtctttgccatgattgaagagattgatgaatcaggaagcccattggctttagaccatgggcagttcacactggagtttagaaacaggatgggagctgacagatatgaaaacagtgaaagaggttgcccggctcacgggagtcagtgtgcgtacccttcagtattatgatgaaatcggtgtgtttaagcccacaaaggtcacagaagcagggtaccggctctatgacgagaaggcgctggatactctccagcagattttgttttttaaggagctggatttttccctgaaggatattaaaaccattatggaggataaaagctatgacaagctggatgccttccggaagcagaaaaccttgctgcgggccaaaagggaccggctgaaccggttgctgcagctccttgaaaaattggaaaggggagaggcttgtatgagttttcaggagtttgatctaagtgagtatatccaggcgctggaagagtttaaaacagataaggcccaggaggtgatcgcacactggggaagtgtggagaattttgagacttttatacaacgagtcagagaccatgaaggaagcattgcaaagaatgccatgaaatattatggaagcattgaaaattatgtgtctgccatgaaggataacctgaatcatttctcggaaaaagcagaagagatggagcagtttgccaaggaaaagggctatgatagggtaaaagagctgaatgatcagcttatgagggatatcacacgagatgtggaaagtgaagaggtgcagaagatcgtggaggagcttgttcagttgacagcccaggtagtaaaccaggaaggggaagcaggtaaaacctattgggatgggatgattgactgctatctcaacaatctggattttcgcagaatgattgacgggaaatatggggacggagcttccagatttattggggaggcatatgagtattattttcgaaatcaggaagcaaagttatccggaaattcttgaggggacagaagactgggggccaaggacctgccattgaaaaattattcgcacaagagcagtgaaaagacagcacagacaggggatgaccccggttctgtgctgtttttctatgtaataaaaaccctccgggggatgcacacaatgtgccagggaaagctgcttcgcagctgcacattggcgcacaaagctgccaagcccctcatgagtgaggggatggggagttgaagcgggcttgtccgctttgttcttggaaagtttttgttggttaaaaagaggttgacaatgggacaaaaagagttatactgggattagatatttagataattatctaaatatctaatctatgaaagggaggtaccgttttgtttaatgacgcttttaaagcactgtccgacccaactagaaggcggattctggagctgctctctgaaagagatatgtcggcgggagagattgcagattgttttaatattgctaagccttctgtgagccatcatctcagtgttttgaagggggcgggactggtcctggatgaaagaaaggggcagaacattatttatagtctgaatatgacagtttttcaagatttaatgaaatggttttttgattttgtgaagggagattcagaagatgaataaacggttgttgttacttatgctaggcatgtccgtgctgtcgtttctgggaatggctgccgtataccccagcctgcctcaggtgatccccacacattttgcttttgacggcacggtgaatggaactggccccaaaagcatcatttttgtgctgggaggcatgcccatcatttttgcggtcctgttttggatcctgccaaagattgaccccagaagaaaaaattatgagaagcatcaaaaggcttacaatatcatcaatctgtttcttaccattttctgtattgtgtgtggctggtccatggtgctggcagcaaaagggtttgatctgaagatacagcttcttctccccattggaattggcctggtgtttatcgtcatgggaaattttatgcctcagatacggcccaattattttatggggatccgtaccccctgggccctggacaatgaatatgtgtggagaaagacacataagtttggaggcatagttttctgtgttatggggatcgtgatggtggttgtgccctttatcccttacaaaatacaggatgggatcctggctgccacggtggcggcgggcattgtgggaacctatctgtattcctacctggtatacagaagacagaaagaaagagaccattaagggaatttaccgccgggttcacggaggatacggaagttaaaggaggcagcaggtatgctggagatcagagatttttctaagacttataagggtgggaagcgggcagtttcccatttgaatttaaaggtagagccaggggatatctacggctttatcgggcacaatggggcaggtaagaccaccaccatcaaggctgtggtgggcatattagattttcaggagggggatatccgtgttggaggaaaatctgtccgggaggatcccttgtactgcaaatccataactgcctatatcccggataatccggatctgtacgggcatctcaccggaatacagtatttgaatttcatgggagatgtgtttggggtatccgggcaggagcgtacccagaagatcaaacggtatggggatctgtttgagatcacaggaaacctgggcagcctgatcagctcctattcccatggaatgaagcagaagctggctattatgggggctctgatccacaatcccaggcttatggttttagatgaaccctttgtggggctggaccccaaagcatccctggatctgaaaaatattatgagggaaatgtgccgccagggctgtgccatctttttctccactcatgttctggaggtggcggagaagctgtgtaataaaatcgctattattaaaagtggggaactggttgccaatggaaatatggaagatattttgggggacgacagtctggaggatgtgttcatggaaattgtggaggaagagaagaaatccggacaggagggatgaaaatggcagggaatatcggaaggctgatcaaaatccaattgctggatgtgaccggctggaatcgctataagtacagcttgggaggaagccagaggctgaaaagccttctcacctttgcggggatacttttagcaggcggagtttttgctttttacagcggtatgctggcaaagctttatattgacagtcacatgggggaggtggtcttcccctttatgtatacaggagccgccatcgcagtgctcattaccgggattttaaagaccagcggcctgatcttcggagccagagattatgaaatgctccaggcacttcccatacacgagggagcggtgatcttcagcagatttacaaccctctatctgctgaatctggccttttctctgtgtctgatgctgcctgctgggattctgtatggcatggatcaaagggcagggctggggtattatgtgggacttggggccgtgctgatcctggcgcctgtggtccctatgatccttgccacgatcctgggaaccttggtgcttgccatctcttccagattccgctataagaatctggtgatgatactgctgggaatgacagttgtggcggttactcttgtgttcagcttttccatgaagggaacccagatggggctggagagtatcacctctgtgacggagatcctgctcacgatcatttataaaatctttcccctgtccaggatgatcgatctggggctgtgccagggaaaaatcctgtggatggcaggctttgtggttctgagcataggcatggctggtttgttcctgtggattatggcgaaaatctataaaagcctgaatacggcagtaaccacccagtatcagcaggcagattaccggatgacccagcaaaaaggccagactcctttgctggctctgtataagaaggagcttcaccgctattttgcatctgccatctatgtgatgaataccgctattgggccgttgatgatggtgatcctgtctgtggctgtatttgcaggatatggggaaaaacttctgaacataccagggattgaagctgttttcgggcagatcctcccctttatactaggctttgcagccatcatgaacgccactgcggcctcctccatctccatggagggcagctcctactggcagcttttggtgcttccggtttccacgagtaccatccttaacagcaagcggttggtaaatttcaccctggctgtgccggccatcgccctgtcaggaaccttgctatacattggtacaaagccggaattttcggcgggaatctggctgtttctcatccccctggcctatacctggctcaccgctgagattggcctgctcatgaatttgaagatgcctaattttcactggaaaacagagactgcagtggtaaaacaaagtgttccggtgttttttaccgtgatcctttgttttgctgctgcggggattcctattttcctcatgttccagttggcggacagtctgctgggttttctctgcccggtgtgcttctgtattgccgttgctgcatctgtggttctccatgtgctgggaaaccaagtgaagctgaatacgctggaaggataggtgtttgggaaacagggataaagggagtcggcgcaaaggaaggattccagcagaggcttaggggtgggcggaaaaaatattaagaaaggcagaaaaatttggacttgacagtctaacgaatgttagataaaataaaactaacaactgttaggtaaagaggatgaaagatgaccacaaaggagcagattataaaatgtgccctggaattatttgcggagaagggctatggcgcagtgtcagtgagagaaattggaagggcagtgggaattaaagagagctctttgtattatcattttaagaataaacaggacatttttgataccattgtggatttttgtttttctaaggcagaggaatatttcagacagcagtcccttccttttgcccagggagatgatctttctgtttttcacactctggatgtggaccgtttgacggagctgatcttttccacctttgggtatttttttgatgacccttacaatgtcatgttccgcaagctgcttattgtaagccagtatgacaatcccaaggccaaagggatctacagaaggctttacggggagtatcccgtgaaatttcagaccggaatctttgccatgcttatggaggaaggggagtttcgggcagaggatccggaggcagtggccagagagttttatggggtgatcttttggctgctccatacctgtgacagccttcaggaggcaaagccttttattcgggagcatgtaaaacagtttgttacaaactatcgcaaggatacaaggagagaatcatgaatccaatgatcatttactattccgaaacaggctttaccaaacgctatgcccagtggctggcgaaggagctggaatgcacatgtctgtcccttgaggaagcggcggcccattcctttgacgtgtacgataccattattttcggaagctggttccatactgggaaaatacaaaagctggactggtttaaggacaaggccagcgggtggaaaaataagaaaaaggtggttttcagtgtgggagccatgccggaagggaaggatgccctagataccttaaaggggaattttactgatgaggagagggaggagatacagcttttctatcttccaggaggactaaattacgaaaagatgggcaggggttccaaggctatgatgaaggtgttctgctttatgatgaagcataaaaaggataagactccaaaggaggaagaaatgagccggatgataagtaaatcctatgacatctcggatcagaggtttttgacgcccattgtaacgtatgtgaaagagaaatagatatagaaaaatgtaaagaaacagacataagggagtttgagtgagtaaaaggaacggcttggaagaaaagcaggcactggaggatcagaagatttttccggtgcctttttgttttttaaaaacaattttatagttaagtatataagtcatatgcaatatatatttgacataaccctttctcagatgtataatgacggtaagaagataaggatgtgtattttagcaggatcaaaaggcacatgggttggagttctgttattgtgcggctgcaggaagggggtacaggtgatgtttgaaaatgactatattatgcgtttgatccacgagattgtcaggacgctcatcaagctgatctttaaaattgacattgatgaggcacagagaaaggattacaaaggagactttgcccagtccaggtgggatgaattgtacaagcttgcggatgcagggaagatcaatgaagcggagaaccggctgtatgacctgatggagatgggagagcttgaggatctgcgaagagcccttttattttatgaccacatcaatgactatgataatgaatttctggaaaaatccaattatacccgggaggagatccaggaagggattggtaacgttttggtgatgtatggttatggaagtcttaaggatacgcttatgtaaaggagtagcaaaatggctaagaatctcaggatgaaactggcacggatggagaaagagctgtcgcagtcccagcttgcccagatcgcaggcgtcacccggcagaccatagggatgatcgaggccggagagtttaatccgtccctgaaattgtgcattgccatctgtaaggcgctggacaagaccttggacgaactgttttgggaggaatgatcatgaaaaaagaagaatttgatgaaagacaaatgcaggatctgtgcagggcaggatcgctgggatttctggtgatgttttttctgtgtgccgctgccattgttgttcagcttatagtgggaaaggcagacctgggccttgtggcaggggagacggtggttctggccgggggagggatcacatctctggcggttagtgtgcgccgtgggttgtggaaacccgatgggaccaaaagaagtacaaagaaaaatctggtgttgtccctgattctgggagtgcctttttccattgtatacttaattatcatgcttacaaaaactcaggattctgttatggtctggcctatattcctgctgttccttgtgggaatcacgctgctggtatttgttgtattaacagcaggggacaggcttaaccggcgggtccagaaaaagcaggaagacaagtattgtgacgaagaagaataaaggagaaagaatgatataccgaaaaccacagtattatgatcttttccaatgtacagccggagattgcccatctacctgctgtgcaggctggaaaattgccattgaccaggagtctttggataaatatggaaagctgaaaggtgaatttggctatgaggtgaaaaatgccgttgactggatggaggaagaatttcttcagcaggatggggtgtgccgccttctcacccgggatggtctgtgcagtcttcagcttcacctgggggaagaggcactgtgccatacctgcaggctctatcccagacatgaagaggaatacgagggcgtgcgggaatggtctttgtccatgtcctgtccggcggccgccaggctgattttgttccaggagaaacccatgaagctggttgaggagaaagacagggagattgaagaatttgaagagtttgaccaggaactttttcatgcccttacaaaagtccgggatattctttttcaggttctgggaagtgaaaacatgagcctggctgagaaggtctgccgtatctggaagatcgccaaggctgcccagaactgtgtggaccaagaaaaagtacaggaaatgacaagggcagtccagggactggaatatgacagggaaatccaagtaatggaaccaggctgggaaaaaataaaagagaattataagattctcaccagtctgacacctgttgagaaggagtggaatcagatgcttggggaggtggaaaagtacctgctttcccctggcgtggaacattattccaaggtggcacagggattttttgaatatttatgttcggattcctactgggcacaacggtgggagcccatcggagagcggctgctggagtattctatttacttgtatttgggcggggcggtctatgatggggaaattctgtccaaggcagctctgagtatatgcagtctgtggtgggcaggtgagctttgtatgcttcaatggtataaacataatggctgcttagagacagcggatgtggtggaagccgtgtaccgctatgccagagaagtggagcattgtgatgagaatttggatttgcttgaggagtgtttgaatacttaattgtattggctttttgagaggctggtaagagaggtgtctcgtaaaacaattataaatgcacatccagaatgagagggcgtatgtacactgccctctcattctgaaaactatattctgtattttcaggagctgcttcaggggtcccaaccacccttgaggcaattttagtataaaaggaaattccgcatttgaacagagaaaaaggaacaaattatagcacaaaaagcttacaatatcatctatttgtgttataataaagaaaagctctgttaaaaacagcatctgccctgccagggagtaaagcttattccgggcggcagcgctggctggagtatggtgccagaccctgtataggaaggtggaaaatctaatagagcgggcaggggtacctgacagaagagaagaaagaggaggggaagatggcaaatcttattgatggggtgcggtttaattttttgtatgtggatatctattcctttggcaggacctgggtctatccggagagtatgatcccctacagtatgcttcggtacattgttgcagggaaggcggtgttctttgtggatggggaggaggttctggtgcataagaatcagattgtgtatctgcccaggggcagccagctttcctgccatgccctggaggacaatttctcttttatcagtatccggtttaccacctcggttcattttgaaggtggtgattttctggcggattattatcacattcccattgttatggaatgtgaaaatgaaaagctgttttttgaagaaatgtatcactgggtaaaaacagacagccctgccaggatgttctatgtgagaggatatctggagctgctcatcggttccttgatccacagaatgagcaaggatgtgaaatacgagaaaagagatatgaaaagtgaggactacgacctggaagaggtgcggcggaggattcagaagaccaatagccgggtggaccccagaattcaggtggtgattgattatctggtcctgcatcccacagaaaaatacagcctggagcggatggcagagatggcagaactaagcctgtccagattccggcagctttttaaggagcaggtgggaaagtctcccagtgaatatctccaggagcttcgtctgactaccgcagcccgtaagcttttgatcagcagcgagaacgtaagtgatattggatacagtgtggggtatgaggatcccaattactttatcaggcggtttaaggccgcttttggtctcacccccaagcagtatcgggaaaatgcaaaagaataatgaatgagaaaataggcagataatgctataaaaaaggcgttttttcctgttttttaaaagatgttcccggaaaaaacataggtattaccggaattttccctaaaagggagcttgattttttgtgctgtttagccaaaatcgggctctttttttcttgacagcattggaaaaattgacatgcaaaaatgctaaaaaagcaggcgctttgtgctattaataagcgtggagtttgtagaaatgcacaaaaaaatagagtatgataaagtcacaacaagcaaattgacgattgcttcggaacaaaacaacgactgtcagatgccatgaaaaatcattggccgaaaagaaaggagaaacaaaatgaaaagaaaaattgcgctgttgttaacaggaatgatgctggcttccagcatgaccgcaggatttactgtggaggcaaaggcggcagaagaagagctggagggagagatcaccttctggcattcctttacccagggcgccagactggatgtgatccaggcagtggcagatgaatttatgaaagagcatcccaagacaaagatcaacattgaaaccttctcctggggtgacttttatacaaaatggacaacgggacttgcctccggaaacgtgccggatatgagcactgccctgccagggcatgtggttgagatgatggacgcagaggcggtgatccccctggatgacctgattgattccattggccgtgataaatttgcagaggcatctctgtctgagggagaaaaggatggagaatgctattcccttccattatattcccatgcacaggttatgtggtacagaaaagacctgctggataaagctgggctggaggttccaaagacctgggccgagtttgcagaagcggctaagaccctcactgaaggagatgtgtatggctgctccttcccctgcggctccagcgacctgatgggaacccgtttcctgaatttctatgtgagaagcggcggcggaagccttcttaccgatgacctgcaggcagacctgacaagtgatctggccattgagggaattaaattctggctggatatctatgagaactgttctccaaaagattccgtaaattatgcggttttggatcaggccaccctttactatcagggcaagacagcctttgactttaacagcggcttccagatcggcggtgttgaggccaactctccggatctggtggatcagatcgactgtgcccccattcctaaaattaacgcagatgacccggattacggaattgaaacctccaacattcctatggtagtgtgggcaaactcggagcatccggaaatctgcaaggcatttatccaggatctctacgaaaaagagaactacattaaattcctggaggcaactcctgtaggtatgcttccttccatctccggaatctctgacactccggaatatcaggcaaatgaaactgtacagaaattctccaatgccgtagatgtgatcagcaaggcagtggacatgggtacagccattggttttgagcacggaccaagcgttcaggcaggccttctcacctcccaggggatcattgagggaatgttccaggatattatcaccaatggaacagatgtagaagaagcggctcagacagcagaagaccagctcaacgaaattttcagcaccgtacagtaaccaagcttggggtttcggggagggatatccctccccgtatgaaaagagaaaggtggaatgagcatttgtgaaaagaaaagcgaattttgattatgcaaggtgggtgtttgttctgccggctctgctggtggtggggactcttctgatctatcctattttttccagtctctactacagtatgacgacaaaacatttgattaaacccgcatatgattttgtgggactggccaactatcgggccgttctttcagacaaaaactttttcaaggcatttcttacttctattatctggacattggcatctttggcaggtcagattttcatcggatttacttctgcgctggctatccacagggtaaaagcggcaaagggtgtgtatcgtacacttttgatcattccctgggcctttccatccattgtcattgccctttcctggaaatggatcctcaatggcgtttcgggctttttgcccaatctattggtacagctgggatttacctctgtccagccccagtttttaagtgacagcagcctggttttcctaacccttgtatttattaatatctggttcggtgcgcccatgatcatggtgaatgtactgtctgccctgcagaccataccccaggatcagtatgaggctgctcagattgacggggcctccaagcttcagcagtttgtacatatcacagtgcctcatattaaggtagtggtaggacttctggtagttctgcgtaccatatggatcttcaacaactttgatttaatttacctgatcaccggaggaggtccggccaatgccaccacaacggttccaatctatgcctacaatatgggctggggaaccaagatgctgggcaaatcctcagcagtgaccatcttgttgttgttattcctgcttttgatctgcattatttactttacgattatcggtaaatgggaaaaggaggataagtgatgggcaaaatgaaaagcaaaatcggaaatgggctctgccatgtatatttgatcgctttgtccattgtggcatttttcccccttttatggatccttctgtcctctgtaaaatcctcgggagacttgattgccaatcccaccaaatttcttccggagcgttttaccctggaaaactttgtccatgtgattgaggacttgggatttgccaccaacataggaaacagccttttgatcgccctgacaaccacgctgatcgccattgtgatctcatctatggcggcctacggaattgtacgttttttcccaaagctggggcagttaatgtcaaaggccttggtaactacttatatgtttccccccatacttttggccattccctattctctggtcatggcaaagctggggctcaccaatacccgcatcggtctggtgatcgtgtacctgtccttcagtgtaccttatgcagtgtggatgctggttggttttttcaaaaccgttcccattggtattgaggaagccgcccgtgttgacggagccaacaaggttcaggtgtttgtgcggatcgtgctgcctttggttatgcctgggatcgtggcaacagccatttatacctttatcaatgcatggaacgagttcctgtattccttgatattgatcaacagcacgaatctgatgaccgtgtctgtggctttgaaatctcttcagggggcagagatcctggactggggagatatgatggcagcttctgcccttgtggtgatcccatctgtgatcttctttatgttcatccagaacaagattgcgggaggaatgaccgaaggctctgtaaaatagcagcgaaacaggctgtatgtggttagaaataaaaatcatgacatgagtaggaggaactgattaatgatgaaaacaataggatatgccgtggtgggcaccggatattttggcgccgagctgggcaggattatgaagaaacaagagggagccagggtagtggctgttctggacccagaaaacggggagaagatcgccaaggagctggactgtgacgtggagacggacctggatactctgtacagcaggccggatgtggacgctgtcattgtggccacgcccaactatctccacaaggagccggtgatcaaggcagcccagcacaaggtgcatgtattttgtgagaagcccatcgccctttcctaccaggactgtgatgaaatggtgaaagcctgccaggaaaaccatgtgacctttatggcaggtcatgtgatgaatttcttccggggggtgcgtcatgccaaaaaactcattaatgagggcgtgatcggggatgtcctttactgtcattctgccagaaacggctgggaagagcgtcagcccagcatcagctggaagaagatccgctccaaatccggaggccatctgtatcaccacatccatgagctggactgcatccagtttattatgggagaaccgctgactgccaccatgacaggaggcaatgtggctcataaaggggaggactttggggatgaagatgacatgctgttcatcagtatggaattcccggataaccggtatgcagttctggaatacggctctgcttttcactggccggagcactatgtgctcattcaggggacaaagggtgccatccgcctggacatgaaggatgtggccatgactctgaaaacggagaaaggcgaggagaaattcctggttcatgagacaaaggaagaggatgatgatcgtaccaggatttatcatggaacagagatggacggcgccatcatgtatggaaagccgggaaagctgccgcctaagtggctccacagcatcatgaaaaatgagatgaaatattataatggtattttacatggagatcctgtagatgatgaattccgtcctctgctcacaggagaagctgcaagggcagccattgccaccgcagatgcgctcacaaaatccagatatgaggaccggaaggtgaagctttcggaaatcgtgggcgggaagtaaatgtctcacagccggccggaaattttgttgaatttccggccaaagtgtcaagtgcgcacacaatcttcctggatcttagtatccgtctggataccacctggagactaggactcatcggcggcacctatctcaatttaaaatagcgtgtatataggaagaatccagtaaaatcaaggggtgcaaccagcggttgacaaattgataagcagtgggttcttgcgttttttcttgtattccctcataatgtgcacatgaaaagtcaatagggaaagagaggggaatgacagaagatgaccatgagattttgtgataagctggtgctgctgcgaagagagcgagggctttcccaggagcagcttgccaatgagctgggggtatccagacagtctgtgagcaaatgggagctgggggcatccatgccggatctgccgaaattaatccaattatctgaaatgtttcaggtgagtgtggattatctggtgaaggatcatatgacacagaaggagcagtccagtaatttttctgccagacaggataagtgtgtacaggaaagcgaagtgctcagccggctggataaactggaaagaaatttaagtggtgaggattccatttttgagtataaaagcaagaggaggattggaaatctgcctttggtgcacattcattataaacgatatccgggcaatgtgcttctgccccttttgttccataacgggggtgtgggagttatggcacttcggggagacttccaggtgaaggccaagggagtgatcgccataggcaatcatgcaaccggaattgttgccatagggtttttagcaaagggtttggtgagtctggggcttttcagcctgggagggatttctcttggtctgttttctctgggacttctcagtgccggggtgatctgtgccgggctgctggccgctggagtgatcgctattggagtggtatccatgggtgtgtgtgccctgggcatgtatgccacaggagtggcagcggtgggaaaagaggtggccacaggagtctccacatctggctttgtgtctgtggggaagcaggatgccaaagggcttcattgccttttagaacaggcagccgcttccagagaagagattcagaattttattctcacctataaaccccagcttcccaaatggctgctggggctgcttaccaggtgcttttattaatcattaagaaacgtaggaagagcgcaagttccgtgatctggcagggactgcgctcttttttcttggggtgcttcaacagtcaatttgtccttgttattggaaagatcaacattggaaaaatcggggaattgaactatttctcatactgacatttaagtgtgcctgtgataaaataaagctatacgataggggctggctgaagggcccttgggaaaagcagcagaatgatttgcggaaaatgtagtatggtaaatgtggtacgaaggagggagactatgaaaaagaaaaaagttgcagccctgtgtatggcaatggtcatggccgttgctccgtggagtgtttatgcatcggaccaggagggggattttgtccaggaggtggatacggacagggagatggcacaggaggttgaggctgcagggcaggctggtgaggcacaggaggttgaggctggtgaggcacaggagctctttcaactgcctgaggaaagcagggaggaagagggagaaaagattgaggaaaatccttttggtcaggaagaggtttcggaagcagcgtctcaggagacttccggggaattcttttctcaggatttacaaggggcctttcaagatgcttcagaggagggagaggagctgctgggagggccgcttcctgatacagcctttcagggattggaggcccaaggatatgaggaaggaaatattaaccagcaaaattatttcacatgggcgaatcccattcagtcttatcttacaccggatgctcagggatttctaagagttgagcatcaggaaaatcaggtgcttttggagcagtataccccggagcttctgcttgtgtcccaaaaaactttgccggacgagcttccttctttcggaggtttttacagtggcatagatgcctattatttggtttgggggcaggacaatgaggaagaaaatgatgcaaaagaagtcatccgggtggtcaagtatgataaaaactggaatcgtctggccagtgcatccctatgcggggccaataccatcacaccttttaatgcgggaagtcttcgtatggtagaatatggaggatatttgtatatccgcacggctcatttaatgtatacttctttggatgggctgaaccatcaggccaatcttaccatggagatacgaacgaaagatatggcaattgtagattcctattatgctgttatgaatgtatctttcggctacgtgagtcattcctttaatcagtttattgttgtggatgacaatggggatctggcagctctggatcatggagacgcttatccaagagcggccgttctgggaaaatatcgggcaaaagcaggacaaaacggctttacagggtcttataatttcgtaaatgtatttccctatcaaggcagtgtgggattaaaccaaacaggcgcttctgtgggcggcctggaagcttccggctcccactatctcactgcgggaaattcagtgatccaagacagtggttttgcgggccgggatacaagaaatatctatgttaccgttacctcaaagaataatttttcatcagcaggcacttctgttatatggctgacaaattatccagaaggcggtaaccaatcagcatccaccccgcatttggtgaaactggggccagattcctttgtggttctgtgggcacagatgaattcctattatgcaaatgggaaaatttcttatgtgttccttaacggcagtggtactgtaacgagtcctgtatacacagaagacgggtatctgtcagactgtgcacccatatttacaggggggaaggtcctgtggtatatcagtgatggagaaaaactggtgttttaccggctgaaccagaatggttccctggaaaaagaggttggccacctgcattcctatgacccggatcttacctttcaaaatacagaagtgcgctgtggatttatagaaggaacggttacgaatcccctgatcaccaattcagacggagaggttcactatttctccagtgatccgtcagttgctcaggttgacagccagggaaaagtgactttgaagggattgggggactgccggatcacggcttcgatttcggctggtttacactatggggcaaaggaagcttcctatgtgcttcatgttctgaacctggaaaagcaggtgattgagacaaaattcagttatacctgtacctatggggataaggcttttcaggcagaggcattggcaaaggacaacgcccggctcacctattcttcctccaaccctgaaatagcccttgtatcttccacgggaaagataactccaatggcagcaggaaccgctgagatctacattcatgcgttggccaccaatacgtatgcccagggaacagccacagtaattgtcaaggtcaatcccaaggatattaaaaattgtaaattgatctttacaaggacaggagacttttctcttgattttacagagattgtaaatcatacggcgttggctgacggaagtaaaattttaaaacaggacgtggactatacctatgatggaatgggcgcctggtattataatgatactatagacaagttttatgccactgtgtgtgggtcaggaaactatacaggtgagtattatatggaaatctcacccatccgtaccaggccggttctaagccaggtatcaaaaaccgcaggcggtattcaactgacctgggaaaaagaaacaggagccatgggataccgcatttaccgaaaggcaggtaacggaagctatcaagcgattcaaactgtatcaaacagggatacagtccgctggatcgatacaaccgggggaggaaataccaagtatacctactgtatccgggcttataccaaggatggacagaaaactatttttacaggaatttctaatgcaagagctgtgacaacgggggtgagacctgctcagcccgcaattacagtgtcgaacagctcttctggtgtaaagagcacctggaaaaaatgcgccaatgccagtgggtatctcatttatcgcaatggcaagaagtatgccactgtaaaagccaacagttttaccgatgccaaggccgcaaacggtaccctgtacaagtataaagtatatgccgtgaatgcaggtgttttcagcaaggcttccccagaaaagagcatctgccgcctgacacagccccttttgtctggtctgtccagtgcaggaaagcagaagatcactgtaaaatggaaaaagaacaccaaggcatccggttataagatccagtatagtacacagagcagtttttctagtgcaaaaactataagtattacaggaagctatgcagaagctgccaccctgtcttcccttacccggggaaagacctactatgtacggatacgcagctaccgcacgctgtccaaaagcaattattattcttcttggagtagtccaaagaaaatgatggtatcctgacaaaatcctctcctgatcattttacttgaaattttcacatggagctgccagcaggcccccggcatggacaaatgccggcgggcctgctatagtattggatgagtaaaaaggaaaggcaaaggagagaatatggatacaagacaaaagtcttttttggaaaaaacggcagtggtgtggcttctggcaatggtgtgctgttttttgtggggaagcgcatttccctgtattaaaatcggttatgaatggtttcacattgacgggaaggatactgcgtcacagattttatttgccggatatcggtttactctggcagggcttctcacgattttcatcggcagcctgctgggaagaaaatggctggtgccagggaagcagtcctggcatatgatcctgaagctggcaatggtacagacggtgatacagtacttgtttttttacatgggtcttgccaataccacgggagtgaaggcttccatcatcggggcctccaatgtgtttgtggcaattctgttttccggggtgatctttcatatggaaaagatcagcaaaatgaaatggctgggctgcgctttgggattcttaggcgtggttctcattaaccttacaggaggaggtctgggaggaggctttcgcttcagcggggaagggtttatttttttatcctcggtctcttatggtttttcttctgtgcttatcaagcaattttcacaaaaggaaaatcctgtgctgttaagcggatatcaattccttacagggggacttgtgatgatccttgcaggaaaagccgcaggcggggcagtgactggatttacctggaattccaccctgcttttagtgtacatggctatgatctctgcagtggcttattcggtatgggggattttgctgaaatacaaccctgttgccaaggtgactgtgtttggttttatgaatcctctgtttggagtgatcctcagcgcagttctattaaaagaaggaaaccaggcatttactttcaagggaatggctgctcttttattggtgtgtcttggaatttatcttgtgaatagagagaaaaaagtagtggcagactaatcttcagtggtatattcttaaatgtttataaattcatgcacatccctttgacaaggaagtaaaacagcggtatattactatcattaaaaggatattctgtcaattcttactgaaagacagaggatatccggactaacggaggcgaaccatttggatttaaaaaatctaggggacaagaaaccagatccccagaaaaaaccaatcattttttattatttaatcggttttttagtgcttattttgatcaactctctgttgctgcccgccatcagggagcgaagtgttgtggagacggattataccaccttccgcagctatattgacaagggcaaggtcaccaaggtaaatgtggacaaaagcagccaggttatctattatgaagtgctggacggggaaaagaccgtggtgtgtaagaccggaattgtggaggacgaaagtctcacagaccgtctgctggcatcgggagtaaagctggcagctaccattcccaccagtgaatcccccattttatatctgctggccggatacgttatacccataggtctaatgatcctggtgggcagatggctgagcaagaagctgatgaactccatgggcagcggcggacccgggggcatgatgtcctttggaaagagcaatgccaaggtgtatgtgaaatcctccacaggaattaagttctccgatgtggcaggagaggatgaggccaaggatctgctcacagagatcgtggactatctccataatccggagaaataccgggatattggtgcttctatgcccaagggcgctcttcttgtgggccctcccggaacaggtaaaaccctgcttgccaaggcagtggccggcgaggcggaggttccctttttctccatctccggttcggagtttgtggaaatgtttgtaggtatgggtgcggccaaggtaagagacctgtttaagcaggccaatgaaaaagcaccctgtattgtatttattgacgagatcgataccattggcaagaagcgcgacggcgccatgccaggaggcaatgatgagagggaacagaccctgaaccagcttctcacagagatggatggttttgacggttccaagggcgtggtcattctggccgctaccaaccgcccggattctctggacccggcccttctgcgtcccggacgttttgacagaagaattcctgtggagcttccggatcttcagggacgtgaggagattctaaaggttcatgccaagaagattaagatcgcagacaatgtgcgctttgacgagatcgccaaggctgcggccggagcctcaggagcagagcttgccaatgtggtaaacgaagcagccttaagggcagtgagggacggcagacgctttgccgtacaggcagactttgaggagagcattgaggtggtcattgccggatatcagaaaaagaaccgggtattgtccaacaaggaaaagcttattgtgtcctaccatgagatcggtcatgccctggtggcagctaagcagacagagtctgccccggtacacaagatcaccatcatcccccgcacctcaggagctctgggctacaccatgcaggtggatgagcaggagcatttcctcatgaccaaagaggagctggaaaataaaattgccaccttcaccggcggccgtgcagcagaggagctgatcttccactccatcaccacaggagcctccaatgatattgaacaggctaccaagatcgcccgggccatgatctccaggtacggcatgagtgaggagttcgacatggtggccatggaaaatgtcaccaaccagtatctgggaggagatacttccctggcctgctcctttgagacgcagaccctgctggacaaaaaagtggtggagctggtgcgcagacagcatgagaaggcatacaatattttaaaagacaatattgacaagcttcatgagctggcaaagcatctctatgaaaatgagaccatcactggtgaagaatttatgaaaattctcaaccagcagcaatatttagaggaaaaaaatccaaattctattgaggaaacttcttccatgtgataaaataaaatacagttaggagccagcagtccaggttttacggactgcttgacaaaaggtcagacaggttccccaaataggtttttggcggaactggtaaaaaccattggaaggtaacagagggttcagccacatgcctctgctgccttctttttttgggcacacaaggctgtcaggccccttgtgagtgaggggagagggagttgacgcagatagcccgtgttgggtccggaagtggtttggaaaactgtattttaaggaggagaagaacatgttccaagaaaaaaagtgctggatcgcactggcggaaaatgaaaagaaggagaaggtgtgcattcttccaagaatggcaaaccgccatggacttgtggcaggggccacaggaaccggaaagacgataaccttaaaggttctggcagagtccttcagcgcctgcggcgttccggtgtttctggcagatgtgaagggggatttggcaggtatgtgccttcccggccaggaaagcgaggatatgaacaagcgcattgagaaattcggactggagggctttacctatgaggcgtatccaacctgtctgtgggatgtgttccaagaagggggacatccgctgcgcacaaccatcagcgagatggggcctatgctgttgtccaggattttagatctaaatgacacccaaagcgatgtgctgtccataatatttaagattgcagatgacaagcagcttcttctgctggatctgaaggatttaaaaagtatcctgcaatatgtgggagatcatgtgaaggattttacaaccacctacggaaatatcactaagcagagcgtgggggccatttccagaagcctgatctctctggaggagcaggggggagagctgtttttcggggagcctgccctggacatcaaggattggatgagagtggatgagaagggcagaggttatatcaatgtgctgcactgtgtgaagctgatccagtcccccactttgtatgccaccttcctgctgtggatgatgtctgagctttttgaagtcatgccggaggcaggggactgtgacaagcccaagatggtgttcttttttgacgaggcccacatgctgttctcagatgcgcctaaaacactggttcagaagatcgaacaggtagtgaagctgatccgctccaagggaataggcatttattttatcagccagagtccttctgatattcccaatgagattttgtcccagcttgggaaccgggtgcagcatgccctgcgggcttacaccccggcagatcaaaagactgtgaaggccgccgcccagtccttccgggaaaatcctgaattctccacagagcaggtgatcacagagctggggattggggaggccctggtgtcctttctggatgaagagggacggccgggtgttgtgcagagaagtcatatccttccgccccagagcaaaatgggctccatcaccttggaggagcgtaatgcatgtctggccggggatggaatgggacagaagtatgataccggggtggacagggaatccgcctatgaaatcttgagccgccgcttccaggaagaagaggaggcgcgcaaagcagcccaggaagccaaggaagaggaagaacggcgcaaggaagaggaaaagcagcgaaaagaacaagaaaaagaggaacgtgccagacaaagagaagaggagcgtatccgaaaagaagaggaacgagaacgcaagaaacaaacagctgtcattgagaagggcatgaacagcgtgatcaacagcattggccgggaagtggggcgaagcctgttccggggaattatgagcaccctgaagaaacgataaaaaacaacccaagacacagaaggctggccttagaggaatctgactgggaccttctgaatgaaaaatgcccgctttctcaaaagataacgggcatttcctgcctggacaccaaaatagttatcagaaatcctcagactgggcatcatatagaagactggacattttttcataaaagtccggagcagtgcgcttcagtgacacaggacggccttcccggtttaaaaagcagtgacgggtagtgcctgtggtgcgcagttccccggtggcctggtctctcacctcatagtccagggtgagcttaatgccgttaaaggcctttacaaataaggtgatggtgaccacatctgagaagtggaccatggagcggtatttgcactctgcctccaggaccggacttagaattccctcctcctccatacggcggtaggagtagccaatggaatccagaaagctggtgcggcattcctcgaaccagcggatgtaattggaatggtggatacagcccatctggtctgtctcgtagtattgggcctgatgggtacaggtatatgatctcatagcgatgcctccttgatggttgccggcgcctgtgaacatttatgagaaccttggtggtcccgtggatcacaccgccgtatttcaaacctccccattataccacaacttgccttttcttttccattggagtataataaaaacatgggaaattacaagtctataggaaaacagcagcaatggctcctgtccggtccaggcaaagaatccttttaaacagggttctttcttgttttatggacaaagcactatagattcttcgtactataaccggcgccggcacaacccatgactttctgtctgtgaggcgttgtagatcttttggatgaaccagagaaatgaaatattaaggagaagcaaatgataaattgccaggaagcaggaagctacatcagcggatatgtgaacaacaccttgtccttggaggaactggatcagtttctggagcacgtgcgttcctgtcctgcatgtatggaagagctggagacgatttttattgtaaatacagcccttcagcagctggagggagacgattctgatactatgctggatatgcgccgcctgctggaactggatatgcggaagaaggaaatgtgggtgcgcagaaaacgttttgctcactttttttggatggtctttcttgttcttgtatgtgccctggttcttgtctttctggtgtttgtgggcattgaagtaagaaaagttttatagaattttgacagtggaggcgatttatgagtgaaaaaattttattgatagacggccatagtattttgaacagagctttttatggcctgccggatctgacaaactcagagggaaggcatactggggctgtctatggatttttgaatatgctatttaaggttttggaggaggagcagccggcatatctgacggttgcttttgatttacacgctcctaccttccgccatgaaatgtatgaggcctacaaaggcacaagaaaggccatgcctgaggaattaagagagcaggttcctctcatcaaagaggttctgggggcaatgggcgtgaacatggtatccatggagggctatgaggcggacgaccttctgggaactctggccaaaaggtccgaaagccgcggcctggatgtgaccgtactttccggggaccgggatctgctccagctggccacggaccgtattctgatccgggtgcctaagactgtgaagggaaaaaccacggtggaagattatcacactgcccaggttatggaaaaatatcaggtgacacccccgcagatcattgagctgaaggcacttatgggtgacagctcggataatattccgggaattcccggggtgggggagaagacagcggcaaagatcatcgcccagttcggttccattgaaaatgcctatgcccatgtggaggagatcaaacccaacaaggcaaaggaatctcttcgggagcactacgatcttgcctgtctgagcaagaagctggccaccatcaatacagacagccctgtggaattctcttatgaggaagcgaagctgggggatctgtatacccaggaggcttatgaaatgtgtaagcgcctggattttaaaaatctgctgtccaggttccagaacgtggatgcagagaatgagatctcccgggaatttttcacctgccaggacctgtccggagcggaaactatttttgaaaaagccaagaagaatccctttacaggcatccaggtgttcgccggggacggatccattgtgggcgcagggattgcgcttggagagaaggaaatttattatatacctgtccaggggatgataaccggtgattatctgggctccagaattctggaaatttccggttactgtgtgctgtgcgccatggatgtaaaatccatgctgaagaccgtgcccattgacgacgtggacagggtttttgatgtggggatcgccgcctatcttctcaatcccctgaaatcctcctacacccacgatgacgtggccaaggagtatttaaatgaaatgattcccaccagggaggatgccctgggaaaaatgtcctttgacaaggctgccagggaagcagctgaggagctggcttccctgggctgttatatggcctatgtgtgtctggcctccaaagagcctctggaaaaagcactggaggaggcaggaatgctgtctgtctacagggatattgagctgccattgatcttcactttgaattctatggaaaatctggggatcaaggtggccggccaggagcttcaggcgtatggggatacccttcagatccgtatccaggagctggagaaatccatccatgagcaggcgggagaggcgtttaacatcaattctcccaagcagcttggggtgatcctgtttgagaaaatgaagatgcccgggggaaagaagaccaagaccggctattccacagcagcggatgtactggaaaagctggccccggagcagccaatcgtgaaggatatcttggaataccgccagctcaccaagctgaaatccacctatgcggacggactgttccaggtgatcggcgaggatggcaggatccattccacctttaatcagacgatcaccgccactgggcgcatcagcagcacagagcccaatctgcagaacattcccgtgcgcatggagctgggaagactgatccgcaaggtgtttatcccggaagagggttttgtatttctggatgcggactattcccagatcgagctgcgcgtgctggcccatatgtccggggacgagaagctgatccaggcctacagagaggcccaggatatccacaggctcacagcctcccaggtatttcatattccctttgaggaggtgacgcctcttcagagaaggaacgccaaggcggtgaactttgggatcgtgtacgggatcagttccttcggactgtctcaggatttaagtattaccagaaaagaagcccaggattatattcagaagtattttgagacgtatccgaagatcaaaggctttttggacggattggtggccatgggcaaggagaagggatatgtgtgtaccatgctgggcagacgccgtcccatcccggagctgtcctccagcaattttatgcagaggtcctttggagagcgggtggcgatgaattcgcccatccagggaactgcggcagatattattaaaatagccatgaaccgggtatacagacggctgaaggagcaggaactaaaatccaggctgcttctacaggttcatgatgagcttctcatcgaggctgcccaggatgaggtggagcttgtgtcccaaatcctggaggaggagatgaagggggcagcagagctgtccgtatcccttgaggtggacatgcacacaggaaagaactggtacgaggcaaagtaagatgaaggtgattgggatcaccggcggtgtgggcgccgggaaaagtacagtgctggactatctggagcaggagtttcaggcagagatcgtccagacagataaggccggccatttagtcatggagccggggcagagctgctacgattccattgtggagcagttcggcaaagagattctagatgaggctgggtggattgacagaaaaaggctgggagaaattgtattttccaatgagcagcttttaaaaaaactaaatgccatcatccatccagccgtgaaaaaatatgtgaaggaacgtatgagaaaaggggaaaaagagggcagagagctgtttgtcattgaatctgccctcctttttcaagatgattatgatgcaatttgccatgaagtgtggtatatttatgcaagcgaggctgtgagaacacagcggctccaaaaagacagagggtactcaaaggacaggatacaggggattttccgcaatcaggcttccgaagcattctttcggcagcactgtgattatgtcattgacaacgagggaaatccagaggacacctgccggcaggtacgggaaaggattcaaaaattatgagattatgcagcattgccagcggaagcagcggtaactgtatttatgtgggttcccagcaggcccacgtcctggttgatgtggggatcagcaagaaaaaaatagaggcaggactaaacagtgtggacttgaccggaggggatattgacgggattctcattacccatgaacattcggatcatatgaagggactgggcgtgtttctgcgaaagtacgcaattcctgtgtacggcaccgccggcaccctggatgccatttccagaatgtcaaccctgggcaggattccagaggggctgttccgggagattcaggaggatgagcctttttacataaaagatctgcaggtgaatccctttaccataccccacgatgcggctcagcctgtgggataccggtttgcctgcggcgggaaatccgtggggattgccacagacctgggacgatataatgaatatattattgaaaatcttcagaatctggacgcacttttgttggaggccaaccatgatatccgcatgcttcaggtgggaagttatccttattatctgaaacagaggattctgggagaccggggacatctgtccaatgaaaatgcgggaagactgctgtgcagactgctccatgaccatatgcaggctattttcctgggacatttaagcaaggaaaataattatgagcagcttgcctttgagactgtgtgctcagaggttaccttgggggataatccatacaaatcctctgattttaagattcaggtggcccacagggactgcccttcagaactgattaccgtgtaggaggaagagacaaatgaaaaagaccattattactgtagtaggaaacgacactgtgggaattattgccaaggtatgtaccttcctggctgaaaaccaggtaaatattgaggatatctcccagaccatcgtacagggatatttcaacatgatgatgatcacggataccagcagatctgccaaggatattgggaccctgtcccaggagctgaaggctttgggggatgagatcggcgttgtcatccgctgccagcatgaggacattttcaataaaatgcaccgtatctaactatccacaagtcaggagagaaacagctatgataaacatgtttgaagtaaacgagaccaataagatgatcgagcaggagaatctggatgtgcgtaccattaccatgggcatcagccttctggactgcattgattcggatctggagaagatgaatgagaaaatctacaacaagatcacaaccagagccaagaatctggtgagcacaggcaagaccattgagatggaatttggtgttcccattgtaaataaacgtatttccgtaacccccattgccctggtgggaggggcggcctgcaaaagtgaggaggactttgtgtccatggcccgcaccttggatcaggcggcaaaagaagtgggcgttaactttctgggaggctattccgctttggtgtccaaggggatgactcccgcagaggagcttttgatccggtccattcccaaggctctggcagtgacggagcgggtgtgcagctccgtgaatgtgggctccaccaagactgggatcaacatggatgcagtcaggctcatgggagaggtggtcctggagaccgcagagatgacaaaggaccaggattctctgggctgtgccaagctggtggtgttctgtaacgcaccggatgataatcccttcatggcaggggccttccacggagtcacggaggcggactgtatcatcaatgtgggggtcagcggccctggggttgtaaagactgccctggaaaaggtgcggggcaaggactttgagaccctgtgtgagatgatcaagcgcacggcctttaaggtgacccgcgtgggacagctggtggccagagaggcatccaaaatgctggatgttccgtttggaattgtggacctttctctggctcccacccctgccattggagacagtgtagctgagatccttcaggagatcggcctggagagagtgggggcaccgggaaccaccgctgccctggcccttctcaacgaccaggtgaaaaagggcggcgtcatggcttccgcagctgtgggcggcttaagcggagctttcatccctgtcagtgaggaccagggaatgatcgatgcagtcaatgagggagctttgactatagaaaagctggaagcaatgacctgtgtctgctccgtgggactggatatgatcgccattcccggagataccaaggcaaccaccattgcgggaatcattgccgatgaggttgccattggaatgatcaatcagaagaccacggccgtgcgtgtgatccctgtgatcggcaagggtgtgggagaaaccgtggagttcggcggcctgctgggttatgcgcccattatgcctgtgaataccttttcctgcgatgccttcattgaaagaggcggaagaatcccggctcctattcacagctttaaaaattaaaaagcaagaacagatattatacggaatgactaaaaacatccggcatcggcacagtgacaggtgccggtgccggtttctgcattaggatggcttagagttggggatggaacttgtcttgactttgaagatttttctgattaaaatataaataaaggagcttgagtatgaaaacagatcagattttaaaagatttttggaatgacaatgctcattttgctgatttttttaatactgttttatttgaaagcaaacaactgataaagcctgaaaatctggaagatgtttctgttgatgtttcagctaatattgaccttaagcaaggaattcaggatcaggtgaagtacagggatgtggtgaaattgtggaaaggaatggagcttgccattttgggcatagaaaaccaggataaaattcattatgccatgcctgaaagaatttttctttatgatgcgcttcagtatgagagtcagaggaaatctatatccagttctcatttaacacggcaagatttaaaaggggatgaatttttgtcccgctatggaaaagatgaccgaatgtatcccattctcacagtggtcatatactatggagagaagccttgggatggtccattacgtctcagtgatatggtggaaatggcggaggagatcagaccctattttaatgactacaagatgcatttgttctgtgtggccggaaatgatggcagcaaattcagtaatgaagacatcaggaaaattttgagagcggcagattgtatcagagccagaaagctgcctgacaaaggtatgtatatgaatgccgtacagataaagaatttggcggcatttctaaactcggagaggatccttagattatcaaaaaaggagggagcaattaatatgtgtacagctttggaggaaatgatcagagaaggagaaaagcgtggagaaaagcgtggagaaaagctgggggagaggcgtggagaacagatcggtgcagcaaaaaaaacaatggtggtagtaaggaatctgcgcaaacagggagtgtcggaagaagtgatcgcaaatattgtggaactttctctccaggaggttcagaaaattaagtgaatcatgaaggtcctgatggggatttcttaggaaagtggaatctgattctcaaacatatagtataaaaaactatgtaaggttgttcaaaagacttgacttatttgggtattgtgatatactttgaatatcaaaatattttatactcgaaggaactgaacgaagcggataggacaagaggctttcaggaccaagagtgaacagtgaggatcagagaatgaacgaaatgaatcataatacccgctccagtcttaagatcggagataaagtatcttccctgccaattattcaaggcggtatgggtgtggggatcagcctgggaaacctggcgggaagtgtagcaaaggaaggcggcattggaatgatctctgctgcccagatcggctttcgggaaccggactttgacaaaaaccccctaaaggccaacctgcgggccattcacaaggaaatggacaaggcacgggccattgcaaaagatggaattgtgggttttaatattatggtggccatgaaaaactatgaagcctatgtaaaagaggccatagctgcaggagcagatttgatcgtatcaggagccggccttcccacccgcctgccagaatttgccgcaggctcaaagacagcactggcccccattgtttccacagataaatcagccaatgtcatcttaaaatactgggacagaaaatacaagcggatcccggaccttcttgtggtggaaggaccaaaagcaggaggccatctgggctttaccagagagcagattgacctgttccatgacagctcctatgaagaggaatttcaaaaaattctccatacagttaaaacctatgaagacaagtatggcagaaaaatccctgtggccctggcaggaggcattgataccccccaggcagtgaaaagggcctttgaactgggagcagacgctgtccaggcagccacgccttttgtgacaaccagggagtgcgatgcagacatccggtataaagaggcctacataaaggcagaaaaagaggacgtggtccttgtaaaaagtccggtgggaatgcctggaagggcaattcataatccgtttctggaacgggtggagcgaggcgagaagatcccccatggctgccaccaatgcctggaaaaatgtgacccggcccagattccctactgtatcacccaggcgctcatccatgctgccaagggagaagtggaggatgccctcctattttgcggagccaatgtataccgcacaaaggagatcaccacggtgcatcaggtgatcacagaacttcttggctagttggccaagggttctggctcaaagtgtgcagcaatacagaaatgtccagggaatctatcataaacaggataagaaatcctgaaaaaacagatttctgtattgacattttgagtttaccatgataaagtaacactatcaaaccgatgaggaagaagagtaggcagttttgtgaagtggcagagagcggagaatggtgggaatccgtacggagcagattgttgaatggccttccgagggcagcccgaaatccatacaggagagtaggcgttgtcgggaaccgaacccgttatcaatcaggagtgtatgtttgtacatgagaaagtggacgatacgtcaagttgagtggtaccgcgataataaggaagcttattaccgtctcaaacaaagaagtttgagacggtttttttatgttataggaaagttctccgaactttcctatgtaataaaaacccttcgggggatgcacagcgccgcgccacttggaaagacagattctttctcgcagacatgaaccagagattggcctatatctctgaaataaaaaaacttatctatgtgagaggagaacaacatcatgaaaaaaatcaatggaatcagaaagatcactacagtagcagcagctttggcaatcgcaggaatgaccgtaagtcccgcggccgtatttggggcacaggagtcttacaccattggaattgaacagtttgcagagcatggctccctggacaactgccgggagggatttctcaaggggttggaagaggagggccttgtagaaggagagaatttaactgtagaatataaaaatgccgccgccgatatggcaaccacaggacagatatctgacaactttgtatcatccaaggtggacctgatctgcggcatagcaacccccagcgcccagagtgcctacaatgcggcaatggacaaagggattcccgtaatctacacagcagtcaccgacccggcggcagcagagctggtggacaaggaaggaaagcctgtgggtgaagtcactggaaccagtgacaagcttccggtgaagcagcagctggaaatgatccgtgagcttcttccagatgccaagaccatcggaatcctgtatacaaccagcgaggccaattccgagtcggccattaaggattatgaggcattggtgggagaatacggatttgaactaaagacctcaggaattaccgcaacggcagatatccctctggcagcggagggccttcttggaaaagtggactgcctgacaaatcttacagacaatacagtggtaagctcactgcccaccattttggagatggccaatgagaagaacattcctgtctttggaagtgagatcgagcaggtaaggatcggctgtctggcagccgagggcctggattatgtggcactgggagttcagaccggcaaaatggcagctaaggttctcaagggcgaggcaaaagcttccgaaattccctatgagaccattgaagacagcagcctgtatctcaatgaaaaagttgctgaaaatctgggagtagagattccccaggagatgaaagattctgcggcggaggtatttacagagatccaagccggcaagtaagagacaaaataataaagaaaagcggtctgcctgaggcgtaatctgtctcaggcagaaattatggaggtagaaacatggatttcatcataacaattctggagcagggattcatctatggaatcttggccctgggtgtgtacatcacctataaaatattggattttccagatctgacggtggacggaagcttccctctgggtgctgcagtaagcgccgccctcatcaccaggggggtgaatccctatgtaacccttctggctgcctttgcatccggggttctggcaggaatctgcacgggactgatccatgtaaagggcaaggtccgggatcttttgtccgggatcattatgatgacagccttgtggaccatcaacctgcgtattgccggcacctccaacgtacctctgttttcccaggagaccatatttaagaacagctttctcgcagagcatgtgccggaggtcctggccccctatatcaccttgggggtgatcctggtgctggccattctggccaaggtactccttgatctgtatttaaagacaaagtccgggtatctgctcagggcagtgggggacaatgacacactggtcacctctcttgccaaggaccagggaaacgtgaaaatcctgggccttgccatagcgaacggtctggtggccctggcaggctgtattttctgtcaggaggaaagagttttcgagatctccatgggtacaggagccattgtcatcggactggccagtgtgatcatcggaaccagtattttcaaaaacatcactgtactcaaggctaccacagcggttatcattggctctattttatacaaggcagcagtggcggtggcgatccggaattttgagcccagagatatgaagcttattacagccgtgctgtttttggccgttctgcttataagtatggaaagaaagaagaaggtgaagggcaatgcttgagttaaaaaatatccacaaatattataatccgggaactgtgaacgaaatgtgtctgtttcaggatttcagcctccagatccaggacggagagtttgtgtccgtggtaggcagcaatggctccgggaagacctccatgctgaatataatctgcggaagtatccctgtggagggcggacagatccttctggatgggaaagacattaccagagagaaggaatttaaaaggaaccggaaaatcggacgggtctatcagaatccggcccttggaacctgcccttccatgaccattctggaaaatatgtcactggcagacaataaaggaaagacctacggtcttggaagagggaccaacaaggcaagaattgaattttacagagaacaattaaggcagttgaacctgggactggaggataaaatgaatgtgaaggtgggctctctctccggaggccaaagacaggccatggccttattaatgtccaccatgacacccatcgaatttcttattctggatgaacacaccgctgccctggacccaaagaccgctgaactgatcatggagctgacagatcagatcgtacaggagaaaaagctgaccaccatcatggtcacgcataatctgcgctatgcagtagagtatggcagccgtctgctcatgatgcatcagggaacctcggtgctggactgcaggggaaaagaaaaagcagccatgggcgtggatgaaatattagagaagtttaatgagatcagcattgagtgcggaaactaggaaggagcagcaggaagtgacatgaaaaagcagggaccgttactgttgaccattgtggcattattctggctttcccagtatgttcatattcctcagcagaccccctatcttactggtctgggagtgggagcgggagccgtgggggtgatcgtgggcgcttatggagtatcccagatgcttctgcgccttcctgtgggacttctggcagactggcagggaaaacataagcgttttattattacaggggtggccagcgccggggcgggagcgctcctgcgggccctggttccctccgggggtggctttttgttggcgaatctctgctctggcctggcctcagccatgtggatctcctttatggttctgtacatgagctattttacccaggaggagcagcagacagctaccagccgtctgatcatggtgaataatctggggatcctgctgggctttctcaccagcaccttgttctatcagcagctgggaatgagaatcctgtctgggatcgcagcaggaggggcagttgtggggctggctcttgccatggggatccgggaacaagagccctgcctggaagagcggcatacagtgggagagctattgcagatctgcaccaaccgccgtcttatcttatttgcagttctcaccattgtccagcagggcattcagatgtccaccaccatgtcttttaccatgcagattctaaaaagcctgggagccactgcggtggtcacaggggtggcatccatactgtacatgtgcgtggcagtggcatcctctggattcgcgggaagcagtttttgcaaaaaaacaggggcaagaatatgggtgcccctggtgttccttctgttaggctgttactgcgttttagttcctagatgcacggccatctggcaggtgcttccctgtcagatccttcccgggctggccacgggaattctgggaagctttctcacctccgaggccatgaaagaggttccaaaggacaagaaatctacggccatgggcttttatcaggcggtgtatgccattggcatgagtgcttttccagtgctggccgggtatctggcccagcactatgacatgaaggccgcttacctggcgctgggaggctttgcctttgccgcctgcgggggctccttcttctacttcatgaaaaaaagagttcctacagcataacaatgggtttttcaaattcgtgagtaaaggctttccctgttttctcacataacacagactcccataggttggatgcaaaggtgttctttgccaaggtgttggaaacttcaatgtttttctggaaatccgcctgggataccttagatacaagggggattctgcttctctgtttgatcagtgacagaagaggagcagagtcctttttcattcccaggatcctggcgtaggaaatggcagggtattcccgaagcttcagcagggtgtgaagaaggctgcgctggatccttgtctgagtcagctcccgggttttcagcaaagtggtaaactggctgaaggattcaaactggttcagacggttgtagattctccttgccagatcctgggaaacatccagataggagatcaattcagagggtgtttctgtgaggaggcagtattttaaaagcagagaaaaatcatccatatccagggtttctccctttgtcacagaatctgccaaaagctggtacacaggggcaggcatctgggcagtcagtgcttccagaggctgtccgctttttaaatagtgacggatggcagtggcggagcagaagttctcatccagcttggtctcatggtagctgtttccctctcttcggatggtgaaggggcagatggggctttcagaaagctccagagccttgcagtactccacgcccagaatgttgtttgggtttttcagaaacttctccatctcctccagggagaagggaagacggaaggcatgcctctggaaaaatccatgaagggccaggctgcgggctgcggggaaggatagcccttccttcagatacacccgcagagactcctgataatccggcggttcctttaccagcacctggctgatggcctggaacaaagagagctccccggcctcgcttccgaagcttaggtgggtgactacccccagattgtccaggatattcactgccccgtaggcaaagtattctgcacttcccgtggcatactccacaggcagctccagaaccaggtcagccccgcacaaaagtgccatctgggcccgggtatgtttttctaaaagagcgggagttccccgctgtacatagtccccgctcatgaccacaatacagtagtccacacccagcagctcccgggtttttctcagatgatagcagtgaccgttgtgaaaaggattgtattcggctataattccggcgattttcataaattgcacctcaaaaaatactttctattaggtttattctaccattgaaacgcttgaaatacaagaatctaggaggtataatattcatagtgaccaaaaacgaaaggagccaatgatcatgggatttattgacgtcattaaagacagagcaagagcgaatgtaaaaacaatcgtactgccggagacagaggatatgagaactctggaagcaaccgagaaaattatcaaagagggaattgccaaggttgttctggtaggaaatgaagagactgttaaaaagagcgcagcagaaggtggctttgacatctccggcgccaccatcgtggacccggcaacatgtgagaaaacccagggctacattgacaaattagtagaattaagacagaaaaaaggtatgaccccagagcaggcaaaggacattatgctgaatcagtacctgtactacggcgttatgatggtgaagatgggagatgccgacggtatggtatccggcgcctgtcactccaccgctgacaccttaagaccctgcctgcagatcctgaaaacaaaaccaggaaccaagctggtatctgctttcttcctgatggtagttcccaactgcgagtacggtgccaacggaacctttatctttgcagactctggtctgaaccagaacccaaccccagaagaactgtctgccatcgcagcatcctccgcagaatccttccagctcttagttgaagaggagccagtggtagccttcctgtcccattccaccaagggaagtgcgaagcatgcagatgttgacaaggttgtagaggctgtgaagatcgcaaaagaagagcatccaaacctgaagctggacggagaattccagctggatgcagccatcgttccaagcgtaggcgcctccaaggctcccggaagcgacgtggcaggaaaagccaacgttttgatcttcccggatctggatgcaggaaatatcggctacaagctcacccagagactggcaaaggcagaagcctacggcccagttacccagggtattgcaaaacctgtaaacgacctgtccagaggctgctctgcagacgatatcgttggcgtggttgccatcacctctgtacagtgccaggctgaataagcagcacatacataaatccacagcggcctacataggggaagcagcgcctgaaacggggctgttttcccatatattaaaacataggagagtaaaatcatgaatgtattggtaattaactgcggaagttcttctttaaaatatcagctgatcaattctgacacagaagaagtattggcaaaaggactttgcgagcgtatcggcattgacggaagactggtttatcagaaaaccggctgcgataaggaaattacagaggcagctatgcctacccataaagaagcgatccagatggttctggatgccctgaccaatgacaagaccggtgccatcaagagcctggatgaagtaaatgcagtgggacaccgtgtggtgcacgggggagagaaatttgcttcttctgttgtgatcacagacgaagtgatcgctgccattgaagaatgctctgatctggctcctcttcacaatccagccaacctgatcggtatccgtgtatgtgcagaattaatgccgggcgtacctatggtagctgtatttgacactgctttccatcagaccatgcctgcaaaagcttatttatacggacttcccctggaatactacaagaactataaagtccgcagatacggcttccacggaacctcccacagctttgtctccaagcatgctgctgagtttctgggcctggaccttgacaactccaagatcattgtctgccatttaggaaacggctcttccatcagcgctgtgttaaacggcaaatgcgtggataccaccatgggactgactcctctggaaggtgtggtgatgggtacccgttccggaaacattgaccctgccattatggaattcgtggcaaagaaggaaggccttgatctggccggcatgatgaatgtgctgaacaaaaaatctggtatcctgggactgtccggcggtctctccagcgacttccgtgacctgaatgaggccgcagataatggaaacgaagatgccgccaatgccattgaggttctgtgctacggaatcgccaaattcgtaggtggttatgtggctgccatgaacggtgtggacgccatcgtatttactgcaggaattggcgagaatgcctgcctggtacgtgaaaaagtagtgggatatttgggatatctgggcgttgagctggacaaagaagccaacggaaaacgaggagaggatatcgttatctctactgctgactccaaggttaaggttgccgttgttcctacaaacgaagaacttgccatctgccgtgagacagtagctcttgtataaaaaatgtgttattaaatcctaaaaaagatctggccccggcatcagaaaccggggccagatctttttttgtcgagtaaaccaagaagaatctaagagatgaatttgtacagatgatcaatgatcaatattcgttttgagtttgatttgtatatctgtgtataagcgctttttatctggttttttcccatctactaaataatcaaaaaggacatctaaggccatctctccttgttttacgggctgctggcagatcgttgccaggatagttccttctcttaccaaatctttggtagtaggaacatcatcgaaggagatcacatgtataggactaggacgttcctggttcatactttttatagcgttgcctgctccgtagacaccaccagcaactaaaaacatagaattaatttctgggtgtttttgcagcatggattttgtaacatggtaggattccatttcgtcatcacgattttccgcaatatcaataatctgaattctgggataatctttaatataatctttaaaaccctggatgcggtctgcgtgggattttgcattaaaaaaacctgtgataattccaacgttgcagatatccttagtagttagctccattagattgcctgcggtctttccacagagataaaaatcatttcctacatagcagaaggaagagttataatcaggcagatccgtatttacagtgacaattggaatttgcattttctctacttcattgagtttttctacaagcagggggtcaatcgtaggctgaataacgagagcgttaatattttgagagagcagttcatctatttttttaatttgatcttcagcagtaaatacaactttttctacaataacttcaaagccgtaggttttatattcctctgctttttcctgaatacctttgttcaattcggcataaaaaggattatctgcttgaatgataatacaaccaatttttaaattcttctgtttaatggctagagtcttgccggcgcggttgggacggtaccccattttatctataatctgcaggattttttttctggtttcttcgtttacatcccctcgattatttattacgcgttccacagttgctctggacacaccggcaatttcagctatcttgctctgggttatcatggtattcctcctcgctcccaatttaattgaaatgagattgtttttattgtagcatacttgaatgcatgtgtcaaaatgtaattagcacgagaccggaaaataaaaataaaattgattttaaaaaaaatattattggcaaatagcataaattagtaccgagaaatttgtatataatgcgaaaattacaaaatgatattgaaatattcggtacataatgctatactcacaattaagagcacgtgaccggtacgagcgaagaaaaaattaacaattcaagatatatttttaggaggtatagcgtgaagggaaaaaagttattgtcaataatattaatgggggctcttacattgtccagtgcaggaaccgttttggctggtgatgggaaaacggaatcacaagatttaatgtttgtaagtattgttaccggaggagtagcatgggggtctgctcagaaagggtttgaagatgctttggaggagcttgggtggacaggacaatatatatcacctaccactcccaatgatacagcaggagttattacccttcttgatacagcagtgactaataaagcggatggcattgttacagttatattagatgcaaaccaagctacagatgtgctgtctaaagcaagagaggctgacattccagtggttacctgtaatacctatacaacggaagagcttcaggattgttggattggaacagatcctgtaaatatggggatcactcaggctgaaactgcattagaatatctgaaaagcgaaaagtataattcttttgatcatgtaacggcatgctatattcaaacaactttagaaacagaaacacagaataagcaatatgaggccttctgcgatacaataaaaaaagaatatccagatgctacaattgtgcaagaagaatgtaactctgatgctgccgtggcttccgataaattagctgcattgttaaaaagttatcctgacatgaatgtggtgataagtcaagatggctatggtactcctggaatcgctaattatgtagaaagtgaagaacttagcgatgagcttattgttgtgggaattgatgattctgaagagatattgaattatgtttctaatggtaccttggattgtacaattgcccaagatttttacaaaatgggatatgaatcggtttattatattaagaatattaaagaagggaataagccagagttttccaacgattcagggacaattgtgatagaagcagcagatgtagaagaacacatgaaacttttggaggaacgtgggcttttataaacgataccagaaaagaggcttcggaaaacattttgccagcgggctatcttgcggatagcccgcctttttaaataatataatcgagggtgatattgaatgaaaacaaaaaagattctccatatattagctgaaaaaaatgaaataggtactttattaccgcttgctattatgtgcatcattgttacttgtattaatccaagctttattgcatttgacaatgttatggatatttttaggacgactagcttttatttagttgtgggagctcctttaactcttttgcttattacggcagatatggatctttcaatcggcgcagtcaccgcactaggcggggttgtatgtatgtttgcgatgaaagctggggtacctgtaatattatgtatacttttaggccttctggcagggggaattgttggaatctttaaggcatgggttatagtagattgcgaattgcctgcattgattgttactttgggcattcaatatgcagtgaatgggattgtatcaatcactacgaaaggaatgtcggtgagtggtactacggaagcatttaaagtgcttggtcagggacgtatttggggaaaggtttatttcactataattatcgcgatccttgtggctgcgttttatcaggtggttttgtcttataccaagtatggacgatcgttatttgctgtagggggcaatcctgagactgccaggttgtcgggaattcctgtgaaaaagagaaaaaaagaaattcatattttagtatctatatttgcggcatttgttggcattttgatggcatctcgttttgcaagcgctcagacaacggcaggttcaggcacggaacttactgtgatggcggcagtgatcataggcggaaccagtatgtttggaggcagcggttctgttgtaggaagtattttaggatgtctgcttttggcagtcataagtaatggacttgtgttgattcgagtgaacagcttttggcagaatttgatttttggaattattctattgatttcagtggctattgataaatatcgtcagaaactcagtggggcggcatagaaatgtaggtgaggtttaaatgatggaatatttattagaaatgagaaatgtaactaaaaaatttccaggagttacagccttggatcatgttactctacagctaaaagaaggtgaaattctaggtatatgcggggaaaatggagcaggtaaatcaaccttaatgaaaattttgagtgggacttattcacataattcctatgaaggagaaatttattataaaggcaggaagattaagttagggaatgtagtagctgcgcaaaagtatggtattgagatgatttatcaagaaataaatatggtacttaattccagcattgcggaaaatttatatttaggtaatttaccgggaacaggacaaaaggtaaactttaaaaaactatatgcggatacagaggaaattttgaagcgcataaaagtcaatgctaagccaacagaaaaagtggcaagtctaaacagtggacaaatgcagatgatttcattgatgcgtgcctacattaaaaatcctaagatccttgttttagatgagcctacatcagcgttgacaggtgaggaagtagaacagctcatgaatattttaaatgaacttagaaataaaggaagctcgtgtatctatatctctcacaaacttgacgaagtgtatcgcatttgcgaccgtgtattggtactgcgagatgggaaaacaattaaaagtcatagtattgctgatgtcaatgaacaagttttgattgaggaaatggtaggccgcaagattgaaaatttgtatccgaaagaatctatagaaattggagaggaagtattgcgtgtcaaggatctgatagttcctcatccaactatcaaagaccgaaatatagtaaataatgtgtcattcgctcttagaaaaggagaaattttggggattggaggattagtgggggcaggacgcagtgaaattttaggtgctatatttgggcagcttattcatggagtacaaaaaaagatatatattaatggcaccgaagttagtattaaagaacctgcagatgcgataaaggccggtattggttatgttacagaagaacgtaaactaaatggttttgtgtggatgctctctatacgggataatatgtatctggcaagtctggacagcattcctatgagagggcctttgatagacgaaaaagaagaaaatagatgtagtttatccatgttccagaggctgcggataaaagcaccgtcaattcatactatggtaaataagctgtcaggtggaaatcaacaaaaggtagtattgtctaagtggctgcttaaagcacccaaaatattgcttgtagatgagcctacaaaaggggtagacgtgggtgcgaaggcggaaatctatactctcatgggtgaattagttaatagtggaatatcaataataatggtttcatcagatttaccggaattaatggctgtcagtgatcgggttctagtaattagtgagggcagggtcagcggagaatttagaagaccacatattacagaagaagcgattatgcgagcggctatttcataaaagggggcattggaaaatgaatattgcagagattgtacaaaaatctcttcggaatctgcctgcggttgaggggccaatccaggtaacggagaagtctcatcctttttgttcaatggcttatagcaggagtccgttagatttaagttcttatggatacttggaggaagaattttttttatcaggatatgcaaatgtctatgatgtggatgtaaaggataatttaattgtaagaaaaaaaatgttgccctataaaaataggatacttaccaggagacctattcatcaggaagatttttccgggcgtgtatacatagatatcttaaatgcgactcagggatatgatatagaggatttgtggcatcggaattatctatggtgtatggaaaatggtcatgcttatgtggggattaccagtaaaccagtaaatgtccaaagtcttaaaaattttgactatgacaggtataaagaattaaattggtctaatggagagttggtggctgcccctgttatatccaaatcggctacaattccgggaacagaggaaggattgatctgggatatgattggccaacttggtatgcttttgcgccaggaatcgataaacaattgcatgggaggctatcctgttaaatatttatatcttacgggtcaaagtcaaagtggggcttatttgaacacatatattaattattttgataagtattttagcatagataaagagaagaagatttttgacggatatatgaacattgtaggtgctcttgtacagagaactgtgcggcaagaagaaaatatcggtgaccttcggctttatcctagaaagaaaaaagaatgtccgactccgtatatttgtgtttcaagtgaagcggatttatacctttttagactttttgttgaggatgatatttttaaaatgacaattgaaaacagcgattcttcccagcacaagataagatattatgagattccatcaactcctcatacagatattatttgtccggtattaactggtctgcaggaaatagaaaagacaggctcaaagcttccgaatttagatccatcacttctggataatattaatgatataccaatggaatattatatctgcggtttactggaaaaacttcatttatgggcgtctcagggaattgtaccagaagcagtagaaccattaagacgctctgaaacagatctgcaaagagatgaatacgggaatccttatggaggactacgcaccccctatgtagatgtgcctattgcatcttacgctgcctgtaatccaaaggatccggaaggcatctgcggaactatgatttattttaccaaggacaaggttttggaattatatggttcagagaagggatacatagaaaaatttagtcagtatgtaaagaaacaggtggaacaaggatgggtatcccaaacagatggtgaaaaaatgataaactggtgtgtaaaagcggtgatgagtttagataataaaaagtagtaccgtaaaattttctatatatgcttattaataaaatgttttaattttatattcaattcaactatattctttgctatagtgttctggagctgcatgcgcccagtgggaaatcaggtggggactgtccccacctgataattattctgaggatttctattaacacattcacctggtgattatctataggattataatttttttaggatgtaaaaaaaagacttgccaaaactggattaatatggtatagtttaaacaccgattcaacatatcacaggaaaatttaatatttagcaaacttatttaaagataaggacgcaaagccacagggtctaaagccattcaggtatgacagccggttgcccatctgccagcaaaggagctggcatttggattctgctttttgcagaattgctgcatacaggtatactgtgtctatgagagacagacttgtatgcagttttttattacacaggaaaagttctcagaactttccctgtgtaattaaaacgtaattaaaaccctccgggggatgcacacaatgtgtcagagaaagctgcttggcagcggcacatttttgcaaagagcagaagacagttgagataagaatgagaccgctcctggaatcggtatgaaagatcaacgcctgaggcgtaataaagaagaggaggaagatcaatgagaaacagaaagttatttcccgtgctgtgtctgtctgcccttttggcagtggggatcgttccgggagcggccacacttgtgtatggggcagagacggattttcaggaagcctatgacaaactattccggcttcctggggaccacattcagtcagtgacaaataatggaggcaggtatgcatccagcgacattaagtacttgaaagacggagacctgaacacccactgggagacaggaaagccaaacagcggtacatttacaaaccaggtgatattcacctttgatgaagcggtagagcttggaagcctggtgtattatccaaggaaagcaggggcagccaataagggctttccaaccgaatattctatttatgcatcagaaagtgaaagcggtgatgatttccgtctcattacccagggaacagccaaaatagccccaggcgccacaaaaatggaatttgaacctgccaggtttcagagactaaaattcgtctttgacaaagccaaccagaattgggccgcaggtgctgagatgatgttctattatccggatgatctaccagcccaggtaaatgatctgtatacagataacaccatgtccacattaaaagaggaatataacagccaggagcgcctggaaaaattgttggaggaggcacaggcttatccggacccgtccttggcagaaaaggtacaaaaagccttggatattcaaaggggtaccgtggattataccgcagatgtattttcagtagagcaaagaggcaacggaaatggccattccagaaccgtacttcgcaccggcgggtatggaagcaatctgctgcccacaggctatgcggctttggcaggacagcaggtgaagatctatgtggaggccgatgaaaacggccccatgccttccgtggtgtttgcacagcaggtaggcaagtggtctggctggaataaaagctacaagctcaaagccggcgaaaatgtatttactgtccccaaaatctacaatgagaactgggcaacaaaggtgatccctggaggtcctatatacatctccaacccttatactccccaggatcagggaacagccccgaaaatccgtattgagggagcccagaggtatcctgttttttacgatggtgacgatgagggaaccttcctgcagtttttggcagactacaggaaaacactccgggaaaatccaaaaacaacagtagatattgtggaaatctgcagtgacaaatttctgcttacaggaaatatgaaggctgctgccgcctatctggataatgggaccagccctcaggctgtggtgaattcccataacaacagccaggatgaaattttccggtatgcgggaattgatgaaagccagtttatccattccagaaatggtgcgagagtcaatgtgcgcctgatgcagccctatgcaggcggatatgcggccaatggccatgtgggcgtccagcaggacgggatcagtacctttttcagggggaatgcttcaggctggctgtacacccatgaaatcggtcatcttatggatacccgggaaggatacatcggagagatcacaaataatatgtgggccaaccacttccgggtagatattgaaaatggattagaccgcgtggattataaaaaaatcttctccgtgcaggcgccggatgattaccaggaacggctggataaattcggggatatgggctatttctggaagcttggtatgttctggcagcttcatcttctggatgaagattactggcccagatatcagactgcctaccgggaaaatttgctgaaggatttcgggttggaaagaaatgagcgcatggccgttatttcctgttatgcagtgggcatggatgtgatcgaccattttgagcgttataaatatgttcagagaaacgatcggattgaccaggcattggaggcgctgggaattcccaaggctcccaaggatctgaagacatggtatctgtggacaaaggcagccaaggacagaaccagttcttttacacaggaatataccccggaaattaccgggatcgttaagaatggcaatgaatttacccttactgctcatatagatgaaagcgccagccaggcacttttgggctacgaggttctggaggatggaaaggttctgggctttacttccagtgattcctttacaggagcctatacagatgacggacagacacattcctataccctgcgggcgtatgacctgcgtctgaattcctcccaggaaagtcaggccagggaagtgaatttcaaggctcccaccatacaggtggcaggaagtaccctggttcccttaagaggagaattccagcctttatctgtagtggaggcacacagctatgacggaacagatctttctggaaatatccaggtaacagccaattcagttgatacctccgcaaggggcacttatcaggtggtttaccaagtggcagaccaggaaggccataccgcagcactttcagtagatatccaggtggtaagctccttcacctatctttctgatctggaggagaccagtgcatctgttggatttggaagctttatgaaggataaatccgtgaagggaaaaaccattacactccttcgaaatcagattccaatgacctttgaaaaaggactgggaacccatgcttcctccagtatagtatatgatctggaaggaaaatacacgtattttgaagctttcgtgggaatcgaccaggcaatggccgggcagaaggcggcaaatgccaaattccgtgtggttgctgacggaagggtgatctatcaaagcaaagagatgaaagcagatacagatgcagagtatgtgaagctggatgttacaaatgtgaatgttttggagctggttactgacagcaatggttccaacgccaatgaccatacggtatggggcggagcaagagtggcccagagcaacagcgctcctgtgatccatgcccgcaacgccaccttccttgacccggaaaatgtggacctttccgccatcgtcagcggagttaccgcagaagatgttgaggatggagatctcacaggggcagttacttatgagaccgatttccaggaaggaaagacaggaagcttcaatattacttattatgtgacagattccgacgggaatcgtgtaagcctcaccaagaagatcgtagtagtaaatgattttgtgtatgccagcgatacagactggaagcaggctaaggtaggatggggacagattcaaaaagaccgctccttgaaaggaaataccatttctcttgcgtctcaggaaggtgtgagaacttatgacaagggtattggcgttcatgcttattcagaagtgatatatgatcttactgacaaggattattactatttcactagcgatgccggtgtggaccagaccggaggcaatggaaactcctctgttacctttgaaatttatgtggacggcgtacaggtggagtcaactcctgtaatgaaaaaagatactccggccgttcagttctgcgtggatatttccaatgccaaagagctgaagctggtagtgactgcagggggcaacggcaacggaaacgatcatgccaactgggcagatgccaaattccttactgctgtcaaggaagcagacaaagagcagttaaaactccttgtggaagaactccgtctgcgggacagccaggattatacaccagagtcctgggcagtggcagagctggctttgattcaggcacaggcagttcttgaacaaaaaaatgccacacaagaagaagttgatctgaacaccgcagctgtgcagaaggcaatggaacagctggaaatgcttgtaaatactcaggaattggaaaaggtgctgacctttgcaaagaagcttacaggtctggaatatgttgacccgcagctaaatcacagggaagtgcgtcttgagaacgtgaaattggctgccgctgattatgaagcggttttggaacatgcggcttcccaggaagaggctgaccaggcagcggccgctctgctttactttatcagtgagactggccagatctatgagcctgacaaagagccccagtcctttgaagagcctacagtgatcagcccggaggaagctgtaagtgatgctgaagagatcatcggcggagaagttttggacagccagacccagccggaagaacagcaggaggcagtacagggctttgtgacggatgttctcccaaatgatgctcagaacttggaagaacccccacaggagccggcctgggagcagcccgtgcaacagaatggggatgcagatccctttggtgattccgctgtggccgtagttttagtggatgaaagcagtacaggatcagaagctgttttctaagactaagagagcagtttgaatgttcaatgactcaggagaggcttgtcctctcctgagttgttttttgatgtatagaggaaatataaatataatatttttatgaaaaatttgttgacatttcaaaagattcatatggcaatgagaaagaaatggtctggctgcttagcgatagccgaaaagaggagtatttttgtgcagatgaggaaatgatacaaatgatctcgatggtaggcagaaatagtttgctctgctatatggttgatgccagtaaattccaacatattgcaaaaatgaagaaaattatttcggaatttgcacaaaaaattgatttcatcaatatgaacaatattccaattaaaaaaactgttgagttaatgaagaatgagaatcaattacagcagaagattgtggactttataaaaaatgcggatctatatatggaaaactttgaatatgtagatatggataaaatccaggtggatattcataaaaaggaggaaaaaccagaagaaaaagcactggacattccagagcggataatggatcaaattcggcttgtttccacatataaaggggttcaggttccaagcctattgtttgattctactggaacaaaaaaaattgctgcgttggcaagctatattgtggaaggattagaacagggaagaatacttgtagtggatgagcttgacagcagtattcactttaaattaacgcgtgccatcgtcgccatgttcaataacgagttaaacagcaatgcacagttgatttttacggtacacgatattaatttgatggactgtaagcgtatgttccgcaaagaacagatatggtttgttcataaagatgaagaaggtgtatatgtatattctctggctgattttacagcgcagcagggggtacgtgataccaccgatattatggagaaatatagaaaaggagcattaggggcgcttcctgatcccgagttgatcaactcgcttctggagttgaaggggaataagaaaggggcggatgtggatgcagaataggcttccagctttcctaaataaatgtacagtgtgcattatctgcgaaggagacgaggaatatgattatttagcaacagacgatttaatgtgggtggaaaacatcaatgtaatattggagggatgagggctgtgaggagtaacacggaccataaaaatttggtcgaaaattttggaagcatgagccaaaattttattgacaaaacaaagagggatatgtataatttatagggtgtggataggagactgctatgctgattcatttattagacattttatccagtgaaggcaagactgtccgggaaaccgtggagttttcaagagacacgattgcgtttcaactgggagaattcaaaatccgccggaaggaaccggtagagcttacgattacgaatacaggcgataaagtcctggaaattcaaggaaagacagaaattgcagcagagattccctgtgaccgctgtcttgaaatggttttggtggacatccccctttctttttccagaaaagtggatatgaagcttacagaggaagagcggatcagtgagttggatgaaagcagttatctgattggtacagacctggatgtggaccagctggtctatcttgaggtactgatgagctggcctttgaaagttctgtgtaaggaagactgcaaaggaatctgtagccagtgcggtaagaatctgaatgaaggtccctgtgactgtaaggatgagccaaaagatccgcgtatggcagctatcagtgatatattcagcaaatttaaggaggtgtaacatatgtccatctgtccgaagaataaaacttctaaagcaagaagagataagagaagagcaaactggaaaatgagtgctccgaacttagtaaaatgcagcaaatgcggcgctctgatgatgccgcacagagtttgcaaggcttgcggtagctacaacaaaaaagagatcattcctatgaatgaagactaaagacaaagtaaaatggagaagattcgtgtatcaacggattttctccattttatttactgtaaatttctgatataataatttaaaaggttcagtctcataaaataccgaagaaaataaaaaaatcgtaaaattggaaggaggtgtgggtcttgggtatctatctgcatagtaaaacagcatatacattatttggaaatgaagctaaaaaaccctattttgttgataaatcattaatcttaaaggaattgtttcctctggtgagagagggtggaaactatatttgcattacccggccacgccgctttggcaaaacggttatggcaaatatgatcgcttcttttttttcgaaggcatatgacgcaagggaagtgttttgcagccttgagatttccggagaaaaagaatgggaacgatacctgaataaatattcagtaattcacatatcttttaatgacgtgtctggcttgaacacatcctatgaagaatatattaaacggatcgaaaaacgtcttattaaagatctgaaaaaagaatatccccatgtaatgctggaggaagagcgttttgcggttgatacactcaatgaaatttatgcagaggatgatacagcacgattcatttttgtattagatgaatgggactatatttttcatcagccctatgtgtgtgaggacgataagagagagtacctaacgtttttaagaagtctgctgaaggaccggccttatgtgattttggcttatatgacagggatattgcctatagcaaaatattccagcggctctgagttgaatatgttttcggaatttaccatggccgcagaagagaaattttctgagtattttggatttacagaagcagaagtggatcacttgtatgaacgttatcagaaattaaatataacatctagaaaagttaccagagaaggattgaaagattggtacgatggatatcatacccaggcagggattcgtctttataatccccgttcggtagtgatgtcactgtcaaacaacaatctgagaaattactggacatcttcgggaccatatgatgagattttttattacgttaaaaataatgtggcagcggtgcgggatgatctggcgatgatggtatctggcaaggcggtcccggcaaaaattcaggaatatgccgccacatctcaaaacctgaagacaaaagaagaaattttctctgccatggtggtttatggctttttaagttatgagaatggaaaagtctcaattccaaacaaggaacttatggataagtttgatgatatgcttcaaaaagagacatctttgggctatgtatatcgtttggcaagggaatctggccgaatgcttcaagccactcttgatggcgatgtgaaaacaatgagtgaaattctggagattgttcatgatacagaaattcctttgttgagttataacagtgagacagagttgacagcagtggtaaatcttgtgtatctggcggccagggatatgtaccacatagagcgggaagataaagcaggaaaaggttttgtggattttatcttctatccagagttggacagaagtgcagattgcatcatcctggagttgaaggcagggtatacgccagaggaggctatacaacagataaagcaaaagaactatgcccttcgatttcaaggcaagttgggagaggaatctaggtataccggcaggattctggcggttggtatcagttatgataaggagaaaaaaagtcatcactgcaaaattgagattttagaaaaacagaggtgatagccttttttaagagaaatacaggaaaactgttatagaaatgttacagggcagggattttccggaatgggattatccctgccttttttgtgcatccaagggaagtgagcagagacatactctgtagagaaaaaagtaaaatttatttgtaaaacaaataaaacacttgttaattttactaaaacatagtaaagtgaacgtaatgaaagaaatacactgtcaaagatttacctggcaaaagaaatacatagaaaaagaaatatctggaaaaggaaatatccagtaaacagaaggagagagaagagatggttggaatcaaagacattgccaaagcagcaggggtatcgccgtccacggtatccaatgtgctcaacggcaagaaaaacgtgggggaagctaccagaaaaaagatcatggatctcatcaaggagatgcattatgtccccaatgaagcagggaagatcctgaaaacaaaggaaaatcacacgattttatttgtgttcagtgattttgaccgaagcttttatctgaatgttctaaaggggatcaacgactacctgaaggataaggagtatgatcttctcatctgtacccagcgctcctgcgagaaatttatgagaaacaatatgagcagtgggtgcattatcctggatgcctctctggatgacgaaacggtgatacggtgtgcaggggagcactatccggtggtggtgctggaccggattttagattccccttatgtaaaaagcgtgatcgtggataattaccaccccatgtgtgacatggtccaggatatcatagaccggggctacaggcggtttgctttcttaagcggtattgagaagaccacggacaccatggagcggtaccaggcctttcgggatacattggaaaaaaataacatctattttcctcagaaaaactatttttccggggattacagggaaaaaagcgggtacacggcagcgaaaattctttctctgacggacgtgcttccggatgtgctggtgtgtgccaatgacaatatggccatcggagccatcaaggccttccgggaaaataacatccgggtccccgaggatattgcagtgacgggctttgacgatattgagcgggcccaggagatggggctgaccaccattacagtcccggattatgaaagaggctatctggcagccttgtatctggtggaatggctgaagggaaaagagacggcagggatgttccgcatctctgccaaaatcaagaatcggaagacggttttagtaaaaagaggtaaaaaataaataaaatagtaaaattattggtaaaaaaccatgggaaaaacgcctaaaaaataaggctttacccatggttttttgacgctttcctgtaaataactgccaaaaacaagcataatgacggaaaaatggggaaatacggttgacaaatcgtgcatgttcctatattatctaggtataacgtttgacaaggacaaacacaaataaaaggaggaaataagtatgaagttaaaaaaggcaatgggcgtagtattaacagccgcaatggcaacctctctcaccgcatccatgggggtgaccacctatgcagaggacgaggctgctgacaagatcatcctgttccagtccaaggtggagatctctgatcagttggaagagctggcagagacctacgaggacgagaccggtgtggaagtggaagtatggggaaccaccggtgatgactatgtacagcagttaaagacaaagctggccaacaatcagggacccacagttttctcccttctgccaggctctgaatctgagaccatggaaaattatctggaagacttaagtgatctgagctttgttgacaagatcgctgagggaatggcagacaccaattctgaaggcaaggtagtgggaattccctataccatggaaggcttcggtatggtgtacaacaaggatctgatgaatgccgaggacgtaaccgactatgattcctttgtaaaaatgctggaaacacagaaagagaacgacgtaaacggattcggactttctcaggagagctacttcctcattggacatatgctgaacactcctttcgctctccaggaagatcctttagcatttattgagaagcttaacgccggtgaagtgaagatggcagacacccctgagttccaggaatttgcaaaattctatgaagccatccgtgaatactcctacaatcctctggaagccaactatgacaaagagtgcggagactttgcaactggtaagactgctgctatccatcagggcaactggtgctacagcatgttcgaagactatgatgtagactttgagatgggtgtggctcctcttcccatcagcggaaacgataagctggctgtgagcgttcccaatgcatggtatgtaaattctcaggcaagcgatgctgagaaaaaagccggaaaagaatttattgaatggctgtatacctctgagacaggccaggattacctgatgaatcagtttggcttcctccctgttgtggaaggtatggaaaatgagaacctggatccgctgtccgcacaggttgctgaatatgccgcccagggcaataccattacatggcctatgaatgcatggcccaccgggatcgtggatgtatatcttgtacccgttgcccaggaattcttcacaacagatatggacggagctgctttccttgagaaattagacgaagcatgggctcaggccaacgaagagaaataatcactgccactcacaagggaaactgtgacaaacggtccccttatatagcagaaacatgaaatagtaggacttagcccggcttacgagaagctgataaataaatgctgctttgatcaggccgggctttgtgctgcaaactatgagggcagaagggagatttagtaatgaaaaaaaagagaagaaacaacgcggcatggtatgcgttgttcaccggacccttattatttgtatttattaccgttatcatcataccgttttttatcggcgtagggtattccttcttttcctgggacggacttcccttgaatcccaaggtgtttgtgggcttccgcaattttgtccgtctgttttcggatgaacggtttatgacctccgcaggccataccattgtatttaccctgcttgctgttgtgtttattaatctcatcggacttttctttgccttgttagtgaccacaaagttgaaagtacgcaacgccgccagggccatgctgtttatgccttacctgatcggcggactgattctgggatacatctggaaattcattttaggtgacggtctttcctatattggagaaaccctgaacagcagcaatcccctgctttccaactggcttttgaagccgtcactggctatggcagccctggtggtggtaagcacctggcagatggccggctacattatgatcatctacatcaccgggatcatggccattcccgacgatgtgatcgaggcagcgtctgtggacggagccggattctggcagaccctgctgaagataaaatttccgctgcttatgccgtcctttaccatctgtctgtttatgaccttgtccaactgctttaagatctttgatgtgaacctctccctcaccggaggtggtcccaataacactacagagatgtttgccatgaacatttataatgagattttttcacagagtaatttcggctacgggcaggctaaggcaattattttcctgatcgcggtggccatcattaccctgctacaggtatccatcacgaaaaagagggaggttgagatgtaatgaagaaaacaaaatccatcgttgccaatgtactagtgatccttatgtccgtgtgctggctgtttcctgtttacatcgtgtttgtaaactccttcaagaaccgggcggagctgtatgaaaacattttggcatttccaaaaagcttcagctttgagtattatgccaaggccatgaaaaagatgaattttttcaatgctttgggaaattctgtgatcgtgaccattgtggctattttcttccttgtgctgctggcctccatgacagcctggatgctggtccgcaccaaccatatgctcagcaaagtgcttttcagcgtatttgttaccaccatgctcattcccttccagaccctgatgatgcctctgatgcaggagatgggctggatccgggatactctgcacattcccatgctggacaacctgggcggcctgatttatatgtacattggcttcggagccagcatggcagtgttcctgtaccatggattcgtgaaatccataccggtttccctggaggaggccgcaaccattgatggctgcaacaagctgggggttttctggaaaattgtctttcctatgctgaagcccaccacaatgacagtgatcatcctggatgtgatctggatctggaatgactatcttctgccttccctggtgctttccagcaaggcgaaccgtaccatccccctgtccaccttctcctttttcggacagttcaccatccagtggaatatggctatggcaggtttgacactgaccattataccggtagttattttctacttatgtgcccagaaatatatcatcaaaggcgtggcagcgggtgctgttaaataatactgctggaggataaaagattgaatgataaatggatttacaagattgacgatctgaagctggacaacgaggagcttctggtaaatgagaccattttccataatgcaaatggttatttgggggtgcgctccaatttcgaggagggttatccacagggctatgacaccatccggggttcttacatcaacggcttttatgatatcgcagaaatgaaacaggcggagaaattatatggaatggtggaagagaagcagaccatgctcaatgtggccgacggccagaccatccgtctgtacctggatggagaagaattttccatgttccagggaaccgttcttgccagcagccggtggctgaacatgcaggagggctataccgccagaaaagtcctctggcgttccccaaaggggaaagaggcagagattttaattaagagaatggcatcctttcagcgccttcccctattctttattgactaccaggtgacacccctgaatttctcaggaaaggtggaattcctgtctgtccatgaggggaatgtaagaaactactgcaaccccaatgaccccagagtggcaggagagagctttttgcatcttcttcctaaggaggctcttctttcggacaacgcctccttcctgctcactgataccgcttcctcaggactgcaggtatgcacaggggtgaaaaacctgattcttggaggagagagccgggagcctgtgttaaaagaccacagggcagagcaggagctttgggcccaggcaaaggagggggactgtgtcaggctgatgaaatatatggtcttcacagattccatccgttaccagcagcctctgaagcaggcgcaaaaagagctggcagagatcctgaaggttcccgccggggagttgtataaggagcagaaggaatacctggataacttctgggaatcctcagccctggagattgacggagatgacctgctgtgtgcagccgtgcgctacaatctgtatcagctgatccagtctgtgggtaaggaccctcacagcaacattgcagcaaaagggctcagcggggaaggatatgagggccattacttctgggatacagagatgtacatgcagccgttttttaccctgaccaacccggatatttccagaaacctggtggaataccgctatgccatcctggaccaggccagagagaatgccaagatcctgggacacaaaaaaggtgcggcctatccctggaggaccattatgggaaaagaatgctccggcttcttccccgcaggctctgcccagtaccacatcagcggtgacattgcctattccaccgtggcctattatcttgttaccaaggatctggactttattgctgacaagggggcggagattgtttttgagactgcccgtctgtggatggacctgggctgctacagcggcggcaccttccagatccacgaggtcaccggaccggatgaatatacctgtctggtgagcaacaactattatacaaatttaaatgctcagtacaatcttcattgggctgtgcgattttataagctcctcaaggaggcaggaaagctgcagccagtggcagagaggatccatctggaggaggaagagatcctggaatttgaaaaggctgagaaagccatgtacctgccctatgatgaaaagctgggcatcaatccccaggacgattccttcttaagcaaggaattctgggatatagagaataccccaaaggagaaattccctcttttgctccactatcatcccatgtacatttaccgctaccaggtgtgcaagcaggcagatacggttctggcccacttcatatttgaggatgcccaggacctggagaccatccgccgctcctttgcctactacgagaaggtgaccacccatgactcctccctgtccacctgtatctacagcattgtggcatctaagcttggaatggaggagaaggcttacgagtactttggagattctgccaagctggatctgtttaatacccatcataacaccaaggatggaattcacactgccaatatgggtggcaactatatggccattgtctatggcttcggaggcttccgcttaaaggaaagcggcgcctggttcgctccggcccttcccagacagtggaacggttaccgctttaagctgatctatgaaggcagccatatccaggtggaggtgaccaggaagggatgtaccttcactttggaaaagggccatcctgttgaaatacacgtatatggaaaaccttgtattttacaggacagcctgacatttgaacggccatgaaaatgaaaaggcgtcctttgcccccgggcagggatgcctttcctatgtaacaaaaaccctccgggggatgcacacaatgtgccagggaaagttgcttcgcaactgcacattggcgcacaaagctaccaagcccctcatgagtgaggggatgggaagttgaagcgggcttgtccgctttgtttagaagaaaataaggagttggaaaatatgaaatttcaggaatcttttttgtggggagcagccacggcatcctatcaggtagaaggagcggccgcccaggacggcagagggctgtcagtgtgggatgtattttgtgaaaaggaaggaaaaattttagatcacagcaatggggcagatgcctgccggcagtatgagctttatgaagaggatgtacagctcatggcccagatgggaatccggtcctatcgcttttccctaagctggtccagaattctgccacaggggatcggggaggtgaaccagaaggggatcgcttattacaaccggctcattgactgcctgaagaagaacggcattgagccctttgtcaccttatatcactgggaccttccccaggcacttcaggaaaagggcggctggctgaatccagattgtgtgaactggtttggggactatgcaaggcttgtggcagagaatttttctgaccgggtacgctattttgtcaccttcaatgaaccccagtgctttattggcctgggctattatggaacctatcatgcgccgggacttggctgctccagaagagaggcgtttctggcagcccaccatgtgctcaaggcccatggcctggcggtgaagatgctgcgaaaatatggaaaaaatccgctgcagatcggctttgcccctgcagggaaatttacttatccgaaatcccaggaccccagagacgtggaagcggccaaagccatgcttctaagagagatccccctggacgactgggtgtggagtctgacctggtggagtgatccggtcttcctgggaagctatccgaaggaggttatggagaaataccaagatgatatgccgcagatcaccagggaagatatggagctgatctgccagcctctggatttcgtgggacaaaatatttacgacggacggatggttgagatgggagaggatggaaggcccagatttagcccccagccggttggttttccccatacccatatgaagagtccggtaaccccggagattttgtattggatgccgaaatttctctatgagcgctatcaaaagcccatcatcatcacagaaaatggtatggccaatacggatctggtgtccatggacggaggggttcatgacggatgcaggatcgcatacctggagagctatttaagctgtcttcgcagggcagcggaggaggttccggtggccggatacttccagtggtcgctgctggataattttgagtgggcatacggataccaggaacgtttcggtctgatccatgtggattatgccacacagaaacgaaccatcaaggattccggcctatggtatcagaaggtcattgacacaaacggagcgtgtctaccctgaccgaagaaatcggatgaaatagacagaaaaaggagatttataagatgaaatacgagggtattatttttgacttagacggcgtgatctgccatacagatgactatcatttccaggcctggaaggttctggcggacaagctgggcatttactttgacacagagatcaacaaccgcctccggggagtgagccgcatggaaagtctggacattatcctggagggatatgagggaaagcttacaaaggaagagaaggagaagctggcagtagagaaaaacgaagtgtacaaaaagctgcttgccaatatgacagaacaggacctgtcccgggaggtggcagacaccctggaccagcttcgggccaaagggatcaaactggccattggctcctccagcaagaatgccccctttattttggaacggatcggacttggagattattttgatgccatatctgacggcaacaacatcaccaattccaagccagatcctgaggtctttgtaaaagcgggagcgtttctggggctgccggcggacaagtgccttgtggtggaggatgcccaggcgggactggaggctgcggcagcaggaaatatggactctgcggccattggagatgcagtaaaatgtggccttggaacttatgagctaagtacattttcagatctgttaaaggtggtggagggatgacaagcgccatggattactcccggggagaccagtggctcatccgggaggccttctttgaccgggagcagcttggaaaggcagagtcagtattttctctgggaaacggttatctgggactgcgctctgccacagaggagggctatctgggagaaaagaggggactttttgtggctggaaccttcaactgctgcgatccctctgaggtgacagagctgccaaacggcccggatgtgacaggaatggagctgtattttaatggcgtgcgctttgccctggatacaggaacggtcctggaatatgaaagaactttgaatctgcgcacaggagagctgaacagaaacctggtgtggatgtcccctgcaaaggagaccttccggctttccttctcccgctttgtatcccgggaaagactgccgctgatcgcccagcgggtgcaggtggagcccctgtccggggactgtaccctggtggtgcgctcaggcataaacggacagatgaccaacagcggagcccagcattttcaggaaaaccaaaagcgctcctatgaccgccagtatcttcagtatacctccaggaccacccagagcggcatctggtttgtggcatcctgtgcccacacaggctatctggatggtgaggggcaaaagcttaggcctgtcatgggcatgggaagaagaacagtctatggggattatcagatccaggtgccaaagggccgcaggtttacaatggaaaagctctccagtgtccatgtgtccagaagcctggagctggaaggaagaacccaggaggagattcaggacctgtctttgaaatttattaaggaggcccagaagcttgggtatgagcgcctgtttatagagagccgcagggtgtgggagaaggagtggcaggagggagagatccttctggactctttgaatccctttgaccagcttgccatccggtttgcccagtatcacctgtccatcatgactccctcccatgaccaccgcatgagcattggggccaaggggcttagcggggagggatacaagggccataccttctgggactgtgatcagttcgtgcttccttattttacctttacctttcctaagagggccagaaagctggagcagtaccggtacgaaaccctggaaggagccagaaaaaaggcggcggtccaagggtatgagggggcccagtttccctgggagagcgcctggatcaaggacggggaggtgacgcctgcctttggagatgcggatctgctcactggtcttccccagaccatctggaccgggaaaatcgagcagcacatcactgcggatgtgatctatggcttatggcagtatgtccaggcatccggggacgaagaattcctggaggactatggatacgaaatgatcctggatacggcccgcttctggtgcagccgcctggaagagggggaggacggccttctccatatgaatgatgtgatcgggccggatgagtataaggagcatgtgaacgacaatgcctacaccaactatatggcctggtggaatgtgaagctggccctggcctgtacacaggagctgaggcagcacaagccggcactttatgaaaaactggagaaaaagctggggcttcagaaggattttacccagaggcttacggatgccagggacaggctttacctgcccgcaccggaggaaagagggctgatcccccaggattccacttatcttacattaaaggacattgatctgtcaaaatacaaagcccaggattatgtgctggggatctataaggattacaatgccagccagctcaatgaaatccaggtatctaagcaggcagatgttctgatcctgttttatctgctggaatctctttttgatgagaggacaaaacgggcaaattgggaatattatgaggccagaacccttcatgattcctccctgtctctttccacacactgtattcttgcggcagacctggaggagagggagcgggcttatgaatttttccaaaaagcggcctccattgatctgggtcccaatatgaagagctcagaggaagggatccactctgcctccataggcggcatctggcagtgtgtggtgtttggcctggcaggggtgcgtctggtggatggaaacctgcgcattcgcccaagactgccaaaagaaattaccagcatttgtttccctctgtgctatagaggagaacggctgcacattactgtgacaaaggaaacggtccgggtggaaaaccgggcaaaaggagaagaccatgtgtatttcggtgattaccagggctgatgactgcggcctgggcgctgggaccaatgaggccatcctccgggcctgccagggaggttttatcaaaaatgtctccttcatggctcccgggcctgccattgtccaggcggcagatctgttccgtgacaggaagaatctgtgcctgggtatgcattttactataacggcagagtgggacaggatgcggcttaggcccctgtgtccctcctggcaggttccctctctcgtggaccgggatgggggcttttacccagatacaaatttcgggggagcctttccggatctggaggagatccacagggaatggaatgcccagttagatgctctaaccaggctggggctggatatttcctatggagatacccatatgtttccagagctggcagttcctggcctacaggaggaattgtccagttggatgaaggaaaaaggactcattgaccaccggtactattatcaggccctgccctgtatggatgacctggcccatgtgccggggctctgggaaaaaattgcctccaggctcacaccgggcacctattattacttgtgccatcccttctggcaggagggtgccacggaaatgctggggaatagagaaataaaagaagaaacgctcatccggtccagacaggaggactgcctttttccagtccgggaaggcttagaggtgtgtgaaaactataagatccggcccatagcctacaaggaagcaggggagaaaacaaccctctgggcaaaggactggctctctggggaaatttatggaggttatcagatacaggctctggatgggagaacctttttcctaaaggactgcttgggagactatctctatcttgtggaaggagataaacgggcggctgtcattgacacaggcatgggattttccgggctgaaggagctgcttggacaacttacagacaagcccattgtggtcttaaatacccacggccacctggaccatataggggccaatgaccaatttcatacggcagccatgcatcccctggaccataagctctttcaggagcatggggaggcctcttaccggagccgttctgtacagggacttaccaaggagctgggaattcccctggatcaggagcagcttgctgccctcatccaggtggataccaaaagggagcttctgcccttggaggatgggcagaggatcaatctgggagaccgggagctggaggtgattcattgtccgggccacaccggaggctctgtgtgtttctatgatgagaaaaaccagctgcttttttctggagatacggtgtgcaacagaggggtcatgctgaattttcctgagtctgcttccatagaaatcttcatggacaccatagaaaagctgaaaagaagaacccagggagttcaggccatctatccaggccatcataaggtacctctggatgcctcctattatgaaaaatacctggaatgtgcaaagcggaccctggcccatcctgaacagggagaatgggaagagtccgcatttggaggctttttccggtttccttatgaggatgtaagtctcacttattaacggaaaaccactttgttttcttttctggagcgctcgctggcggccaccatgagatggctttccagggtttcctcaatgagggtgaggttcttctgcacagtgtccttgccctctaaaagagccaccacatcctgtacaagaccaatgtctccgcccacatggccgccgccgtaggcgtctccctcattaagggacatatcaaatacctgcttttccttgccgaaggggtgaaggacaatggtctcctctagatcgttgcagtaaatttccccggcggttccgaagatgtgagtttttctgtagttttcattggaaaagccatttacagaaaactgggccacaattccgttttcaaaggtaatggcagccgtctggtgatcagccacattgttgtccccggcgaagacacagcgtccatactggttggtttccagagccttttggatggcttccttgtctggctggttgcacaccgcataggtaccccaggggaattttggctggggatggtcctggcggcccagatactgaaggcgggcatcataaatgcaggtgtccctgtgaggacaagtaaagcaggaggatgccgccccctttggcgcattttcaggggtatagaaggtaaggcctccctgagagtagatggaggcgtagggagactgggcccaccagtgaagaagatccatgtcatgacagcattttgccatgagaaggggggaggtctcctcttctttatgccagtggcctctcacatagctgtggatatagtgccagtatcccacgttctcggaatggcggatcagtaccgttcttccaatggagccttcctccagaagctctttgatcttctgatagaatttagaatagcgaagtacatggcacaccaccaccttgcgctgtaccttggcagccaggtcccgaatctcctccaggtgctggggaaggggagatacaggcttttccacaagaatgtgatagcccagctttaaggcttccatggtgtggccatagtggtcgcggtcctgggtgcagatgaacagggcgtctgcgatttttccctggcgaaagaaggcctctgccccctcataggtctgatcctcattgagatgaaaacgctccatggccagctggatacgctgggggtccttgtcacacacagccacgatctgggcgtcagtacccagaagaaggagcctgccgtaattcattccacggtcacccaatcctaatattgctacttttaacatcatctgtttcctccttaacgggcaggcagatccgggcggttcttttttttctgcctgcttctttctgttttctaagatatctgatagtatagaggaaaaagaggaaatgcaaaagaatctatcttgccaaaactgtatacaatcttgctgtttcagccaggagggagtcaatgacaaaggaaagatactatgaggaccatcggggacttatagagccgggactgccggtaatatccagggaatatcgtctcacaaggggaggggaggaggtgcgtctgcactggcatgagggcgtggagctcattcatgtgctggagggctcctgtatcatctggcagaaccttcatacctgtcaggtgacacagggggaaacagcgatcatcagtgcaggagccctccaccggatctatgtggaggagcaggatgtcaggtatgaatatatgattttggaaagggagctgtgggaagagctttcggtgccgccagggaaggatcagtttcaaagagaggcacttcaggatgagggacttgggtggatggtgggagagcatgcccgcctgcgggattatgagggcagttatcataagatacaaagaagaggacttctttttctgatcatgggaagacttttggaatgctatagtatggaaaagggcggggactgccaggaggataagcggattccctgtgtgcgcagggccattgcatatatggaggagaattaccgcagggccttgtctatagaagagctggcccaggcggcaggctacagcaaataccatttctgccgctgctttaaaaccattacaggaatgaccccagtggaatatgccagccgcctgcggtgtgagagagtaaagaggcttcttctgggaggaaatactaccattttggaggcggccatgaacagtggtttttccaatatggcacatttttaccgtacctataagaaatatatggggcatcttccttctgaggatgtcccttcctaaaacaacagggaaaggatcatgacacaatgagaaacgagaaattttatggaaaaacagattccgtatgccccgggcatcgtatgatcaagggagagacttaccgcatttctgtgctcacccagggccttatgcggttggagtacagccctggggggcattttgtggatgctcccacccagacggtgtggaaccggaattttccagggtgtgattttgtggtaaaggaggaggaccaggggctggagatccttacaccccggatgcacctgatctataataaggaggcattttctgcccatggtctgtccattcaggtgacaggaggggagacctggcattacggacagcccttacaggacttggggggaacggccagaaccctggactgcgtggatggagcctgtgacttagagccgggaattctgtccacagggggactgggaatgctggatgacagtggctccctgcttctggatgaggagggaagggcacgacccaggcaggagaaggagatagacctatatttctttggatatggccaggattaccgggaggccttaaaggccttttacaccctatgtggaaagacacctatgcttcccagatatgcccttgggaattggtggagcaggtactatgaatatacacaggagtcctatttgaagctgctggaccggtttgaggaggagcagcttccttttgctgtggctgtgctggatatggactggcatttggtggatattgaccctaagtatggcaccggatggacgggttatacctggaataaggagtattttccggacccggaggactttttggcccagcttcatgagagagggatgcacaccaccttaaatgtacaccctgcggacggggtgagggcctatgaagaatgctacgaagatatggccagggctatgggcattgacccggacacagagcttgctgtaaagtttgatcttggggatgagaaatttctggaaaattactttgaactccttcatcatccctatgaggagatgggggtggatttctggtggatcgactggcagcaggggaccagctcctctgtggaagggctggatcccctgtggatgctgaatcattatcattatctggacaatggaagggaccataagcgccccatgaccttctccaggtatgcggggcctggcagccacagatatccggtgggcttttccggggataccattgtcacctgggaatctctggagtttcagccatactttacagccacagcctccaacattggatttgggtggtggagccatgacattggcggccacatgcacggataccgggacgatgagctggaggccagatggcttcagtacggtgtgttctctcctattatgcgtctgcacagcacgaaaaatgaatttaatggaaaagagccctggcgcttcccaattaagatccgccaggtgatgaatgaatttctccgcctgcgccacaggctgatcccttatctgtataccatgaattatcgaagctggaaggaggaccagccccttgttcagcccttatattatgaatatcccagggagcagggggcctatgaaaccaggaacggatatttcttcggctcagagcttttggtctttccagtgactgcccctatgtatgagaaaatccatagggcaggaacagacggatggctgcccgcaggcacctatgtggatttctttacagggatgatctattccagtggggtgagccggcagattactttttaccgagatatagacaccattcctgtgctggcccgggcaggcgccattgtgcccatgaccgatgaaatcctgggcagaggggcccaggaaaatccatcctctttaaaagtccgtgtgtttgcaggggcaaatggctgcttctccctttatgaggatgacaatgagacctgcgcataccaggatggacagtgtgcggtgacgcccatggaattttcctgggaaaaggatgcccgtttccttgtggggagggttcagggagacttatctttgattcctggaagaagggattatcaggtggaattctggggaatggcagatgcccaggttcaggtaacggaggatggaaaacctgtggatttccagaagttctatgagaaggaggcaaatcgattgaccgtgtccgtgccgggacatgacggtgggaaggagcttttgatccatttccagacaccggttatgctgggggataatcatgtgggggaaaggatatatcagcttttggatcaggcagagatttcctttgaccgaaaggagcagatcatgaatctggtgcggaacagaaccaatgacctgaccttcgccggacagctttatgccatgaagctggaggaacatctgcagggtgcggttatggagatcctgtgtgcaaaagaataagatagaccagataaaagtataaaaggggctgtgaaaaatgagttaatcggactctatttttcacagcccctttgcatatatagacttgatcctatgacttgattttatgtctgttatgtggatttccatgccatttttaataaaagtgtcacgaatggtaagaaaacgtcacgaatggtaggaacggaggcattttttatatgctataatattcttaatacctaataacaggagacggctatgtggatagctggtcctggtactgtcatctgttcttcggaccatgggctggatggtttttgagtcaaggtcctgcaggatctggacaagatctattcagagaaggttttgaaaggttttgcatgaggatgaggagtttttgacagataggatctggagaggcaatgatcaaattaacaggaggaatgatttatgagaggaataaaagttatgaagcgggtcatggcggtactggtgtctgtgtctatgctttttaccatgtccggtacaccggtcaatggggcagcagggggcataggagggacaggagacggtgtgtgtgcccatcatccgcaacacacaacagattgcggttatgtggaggcacagccgggaacgccctgcggccatgtacatactgagaactgctatgtgacggtggaaaattgtgtccacgagcatacggcagaatgtggattggccacagacattacggaggatggcgctcccctgtaccagggtgagaatccgggcacggccgggtgcagtcatgtgtgcggggaggatacgggctgtatcacaaaagtcctggactgcccccatgaacggggggagcatgacggggactgcggctatacccagggcacagagggaagtccctgtaccttcgtgtgtgctgactgtggtgaagtggaagaagggccgcaggactccatctttgaggatgcctgcccagaaatgcagggggggggtatacgccggagtcgggtttagaggcaatggaaatcccttctttatttggcagtgaggagctgtctggcggcagtgatatagttacgcaggataatatcacaataactgcctccaacgggggggaggttgcgtataccagcggcgatggcttcaagctgacacacgatggggactatcggatttctggtacatgggctggcactattaccacggcaaaagttaacgatcctaaaggtgtcattttagtaaaagcgggtgtaaatgccaatatcaccctggacaaggtaactattgatgtatccaggacagattatactgcggcatttaaaatagaggataattccacgggaaatgtcaccattacgcttacgggcaataatacgctgaaaggcggcaaccgctgtgccgggctggaaaagaacggtgacgctggcggtaatctgacgattagcggagagggtgagctgaaatcaactggaggcagttggggagcgggaatcggaagcggctatgagggagcaggcagtggtataaccatcgagggaggcaaagtaactgcaaatggcggcgatagaggagcaggaatcggaggcggcaatggaggagcaggcagccatatcaccataaaaggaggcgaagtaattgcaactggaggcgattttgcagcgggaatcggaggcggctatcagggagcaggcagtggtataaccatcgagggagacaaagtaactgcaaccggaggcggtaatggagcgggaattggcagcggcagcagaggaacggccagcgacatattcatcaagggaggcgaagtaactgcaaccggaggcaataatggagcgggaatcggcggtggcaacaatggagcaagcagcggtatcacgataagcggaggagaagtaactgcaactggaggcaattttggagcgggaattggaggaggcggttggggagccggcagcggtatcactataagcggagggcaagtaactgcaaccagtggtattaatgcaacaggaattggcagtggttttaatggaggagccagcactggcaataaattaaacggtaatgccattgtctttgccaagaaaggttttacgggcaagtatgtggatggctttgcaggcagtgacttgaccggcggtatcctgtttcaagggaatagcggaacagtgtatggaaccatcactcttgggccggaccagaccctgacgatcaaagagaaccagaccctgacgattccccaaggttctgttctgataaacaatggtgtgatcaataataatggaacgattagcggagaagagagtatctcgggaaatccgcccaataacccgtcagagataacagatgtaagctttgtaaaagataacagcacagtggctgcggccggaattggcgataaggtcttcctgaaggcaaccgtaaagcagaaaactgccaggagcggcaataccggcatcgataaggtgatcttcaagctgggagatacaatgcttggcagtgcagcagtggaaaatggcacggcaaccagcggtccttttgtcatatctgttgaagacggctggaaatggggcgataatgccgtgacagtagaatatggcgggggcatcggcttaatgggctccagcacggaaacgaagctcaaggtcaacgccattacagcgggcggaattaccataacatcagataatggcaaagccacctacacccagggcagtggcttcgccctgacagaagagggtgactataggattaccggtaaatgggatggtcctattacccaggggacaatggacaatacaaaaagtgtcattttagtagacgacggtgtaaatgccaatatcaccctggacaaggtaactattgatgtatccgggacaccttatacttcggcatttaagatagcagataattccaaagggaatgtcagcattacgcttgtgggaaatagtacgctgaaaagcggacagaactgtgccgggctgcaaaaaaacggagaagctgaggatattgggacgctgatgattagtggacagggggcgctggaggcaactggcaagtatggagcaggaatcggaggcggctctcgggaagcaggcagccatatcaccataagcgaaggagtggtaactgcaactggcaactatggagcaggtatcggaggcggtaacagtggagcaggcagccatatcaccatcggtggaggcaaagtaactgcaaccggaggcaattcaggagcgggaatcggaggcggaggaggaggccctttgggagcaggcagccatatcactataagtggaggcgaagtaaccgcagccggaggcagtaatggagcgggaatcggaggcggtagccgtggagcaggcagcggtataaaggtaagcggaggcgaagtaaccgcaaccggaggcgattcaggagcgggaatcggaggcggaggtgctggagcaggcagcggtatagagataagcggaggcatagtaaccgcaaccggagggtattttggtgcggggattgggggcggcaacggtggagcaggcagcattataaccataagcggaggcgaagtaactgcgaccggaggctttttgggaatgggaatcggcagcggtaatgagggaacgggaagcactggcaataaattaaagggcaatgctattgtttttgcgatgaatggaggaggtatagagtggcatgtgactggctttgcagacagtgacttgaccggcggtatcctgtttcaaggggatgacggaaaagtgtatggaaccaccacccttgggccggaccagaccctgacgatcaatgagggtcagaccctgacggttccagaaggtgctgtcctgaccaacaacggagtgataaactgttacggaactttaaagggaaaggtggacgggaccggaacggtgaactgggcttctaaggtggatgttacgttcttgaaggatggagttcagatcacagaagccgcatacggcgatgtcatccagataaaagccactatagagagaagacagacagacgccctccttggaagagctggcagggaaacggtggatttctggcttggggacattgacagtggggaaaaactgaacctggctccggtggagctgacaaacaccagcggcacagtgacggctgagctttccaatgtgaaattgagcggcgccaactgggatctgaagggcagtgagggcaaggagttcacggtcacggtggattttggcggctccacggatgcatatcttttagacagcatcaataagggctctttcacgctgataccggcacagttcaacattttgatggaggataagactgtctcctacgatggaactccgaaggagatcaacgagcctgtcattaccgatgtggaccaagaagcaatcactgagggagtgaccaaaacttactatacagacaaggcctgcaccatgcagaccacacctgagaacagcggtgcgaaggaagggggcggtgccccggtaaaggcgggcacctattactataaagtgaccgtaccggcaggcggcaattatgcagagacctcaaagacagccacgctcaccatagaaaaggcagacactgtcatgcacggcctgaagacctataaagacggggtggagggaacgagcttcttttacggggataccgtcacggtgaaattcacccccaaagcggaactggcggcatcctcccgcagggcagcaccggacatcagggaggcggcgttgttcctggatgacaagcagcttaccgatccggtggaatgcagggaaggaaccgaatgcgtcctctcttacgaaattaacagggaaacgcccttaaagttccaggagaacaccctgaccgtgaaatacggcggcggggataacttaaaggatacagaagatactgtcaccatcaccctggacaagaaagtgctcactgcctccataggcagtccggacgctccccacgccaagatctatgacggcacgaaggaatttaaagacatagagctgaagctggagggaatcctccctgacgataaggtatccgccacggcggctgggacagtggaggacgcagacgccgggacagacaaaacacttaccatcaccaagacagacctggatggcagagactgccgcttttacgacctttcaaaggaggctgttaccgggaccgtgtccatttccccaaggaacgtggacaagcaagtggatgataccagggagatcctcagaggcatggcagcttttaatgagcctgtctttgagggcgtgaatgatgaaacagtgaccggcacaatggtatacagctacaacaatggtaaaaggacctacaacgaagtagtggaggagctgaaaacactaaatgaaggtgaccaggcacaggtggggtacacctttaccgcagacggaaactacaccggaaccattaccgggaccctttccatgaccgttgtggacttgaagttcgcaggggcagaggaggccctgaaggtagaacatgagccggtctatggagacccctggggcaggatccttacctggaacgcatccagactgtccgccactcagaagggaaaaaaggtacaagggacctttaccctgaccgtggacggtggtccctgggacagcgcctccataccgcctgctggggaacacaactacaagatcacctttactgcaacaggcagcgatgttttcaaggacatagaggtgctctccaacaccctggccgtggccaagcggaaggcgtccctgacctgggacaaacagaccttcacctataatggccaggagcaggcccccgctgcagtcattaccaataaggtacacggcgatgacgtggctgttaccgtcacgggcgggcagactaaggcgggagagggttataccgccactgccgccctcactggagaggacgcagaaaattatgacctgtctacagggaacaccatagacttcaccattgagccggcacaggcgaaggggaaggccacagtggactttacggatggaaacagcgatggaaaactgaacgcaggcgacacagtgacggtaaatacttccggcgttagaccctcaggcgggcaggaaagctatcagtggaagaagatcgtggacggggaaacaagaaatctgggtacaggcagcagttataccttatccagcggcgacaccaaaggggagatctactgtagtgtcacattcagcggaaatgtcacaggcatactaaaaagtgaccggatggtcattgccaagaagcccctgactgggaccgctgccatcacgggagggacggagaagggagataccctcaccgtccccgccccggacaataccgggattacggtggaagattatacagtcacatggtaccgggacaacgaacccattgagggagcaaagggcctgacatatatgatcgcccgggaggacctgggaaagaccctgagcgtgctcatcacggcaaaagacaccagcccagacttcacgggaatgctggcctcctccaaaatggaaatcccggccacagcgccggaagcaccagtgctgaaggccagtccgggggacggtgcggtaacggtcacctggaagaagccctttgacaacggctcctccatcacgggctattccctgacagtaaagacggtaaaacagggggacacacagatcacaggctcccccttccccatcagcccggacgccaagcagcatagggtgaccggcctggccaacggtacaacatacagctttaccttgacggccataaatgctattggcggtacgccttccaacaccgttaccgctacacctgtgcatagcagcccctgggagccgcctgtgccgtctgtcacgccgatcccgccgatcccggataattatccggagggctccaagtggcagccggacggaagcatagagacacccgggggaacggtggtccagccggacggcaccatcctcctgcccgaccagacccgtctggagcccggggagaacggggagaagccttccatagacaaagagggcaccgtgacggatatcaacggcgtaaagattaaggaggacggaaccctcattctcccgggagaagataaagtcagcctggaggatgacatcatcctcacaccgggcagcagcggggaacggccattataccacagagagacagcagggggtgagtcccaggaggggagcaccatccgccgtcccggaactgccgatgtgattgtccccaaaggggtaaaggtggatcctacgggagccctggcctacccggacggcagcgtctatgacggccaggggaatctggtccgccccggaaccccggaggcggcagaagataccagcctgtggtacgagcgcaataaggtgttcatgaagctgaagggacaggcccagggagcccagggatatgacttctatctcagcaagagcagccagctcccggatatggaagcaccgttcaagaccaacttaaatgaaccagacgccatcacctccttctattttgtgagaaagggatcttactatggctactgtcgttcctggttcagggacgaggacggccggaagcattacagccagtgggggagccttggaactctggaggtgccccatgacacccccaatgccagcgccataaagtccgtgaaggtgaaggggaaccaggtcaccatccggttcaccaagggagccagagcagagggctttgactgcatgctgggaagggcactgcgtgtcattgaccaggagctgcgccctgtgaattacgggaagaacctgaagaagaattaccacagcaccacagtgaccttcaccaatctggccaggggaacttactatttcggggtacgggcctacatcaccaatgaagagaaactgaagatctttggaagatggtcccagcagtcagagctgacaaagattcggataaagtaaaggattagaataagacaagggaaaaagaggggagctattccaaatagatagcttaagccaaggggcagtgtgatctggatcacgctgccctttagtagcagtttctgacattcgccttgtgttttccagcatatattggcgtacaaagctgttgcaggatattgacaaaactaacactgttagtttatcatgaatgatagaagtatttgtctaaggaagagaaatgagaaaaacttccagcaaacagtcaggaaagtaaaaaagccaggaggacacagaagtgggccgtaagggactaaacaatgaggtgatcattaatgcagccatagagttggtggaggagaagggatacaggaaatttgccctgagggagcttgctgccaagcttcaggtgcagccggcgtccctgtacaatcatgtgagcgggattgaggaattaaataccgcagtgggccttcatggaatccggcttctggaggactgtctgcttcaggaaacccagggggaggatagcgaagcgtgtctgcggaaaatggctgaggcatatctcaactttgcccatacaaggccggagctgtaccacgccattattgggatgaagagctcggaaaatgaaatcctgcgaaatgccctccatggaattgtccagccctttttagcggtgatcggcagagagattccggacagggagcaggtcatccatcttcagagaatgctgcgaagccttctccatggctttgctgaactggagcgggaggggtatctcacctacgagagtccggcggcacaggacagttttcattatatggtaaatggattcattgaggtatttcataaggaaagaacggaggggtcagaatgaataaagggggaaatacgcagcagtttgagaaaatgacccagacgccggtttctgttttgatcgtcagtctggggattcccactattatcagcatgcttattacaaacatctataataccgtggatacttattttgtcagcaagctgggcaccagcgccagcggtgcagtgggggtggtgttcagccttatggcgatcttgcaggcctttggctttatgttcggccacggggcaggcagcattatttccaggaagctgggcagccgtgataccctcagtgcggggaaatttgcatccaccagctttttcctttccattgtcgtgggaatcctcattggcgttttgggaattctgtttctcaacccctttatgcgcagccttggaagcacggagacgattttgccctatgccaggcaatatgggctttatattctgctggcaggaccatttatgacaggaagctgtgtgcttaacaatattctgcgctacgagggaatggccgcctatgctatgatcggcctcaccacaggcggcatcctgaatatgatcggagatccgatctttatgttcgttctggacatgggagtggcgggagcgggagtttccacggcattgtctcagatgatcagctttttcatacttttgtttatgttcgtgtcaggaaaaacccagagtaagctgtctctgaaaaatatcaccctggcttctaaggatgtgggccagatactggcaacaggatttccaagtctgctccgccagggcttaggcagtgtatcagtgatgcttttaaaccatcaggcggcagtgtacggggatgcggcagtggcggccatgagtattgtaaaccgtatctgtatgctgatcttctctgtgggtctgggacttggacagggctttcagcctgttgcagcttttaattacggtgcgggaaaatacgacagggtaaagaagggcttctggtttaccgcaggagtctccgaaataatcctgggaactctggcgatcaccggaatgcttctatcttctgggttggtggggattttccagaaggatccccaggtgatcttgatcggcacgctggcccttcgtttccagcttaccgcctgctttttccagcccttatctgtgtgcaccaatatgatgttccaaagtgtgggggagagtaagcgggcctcatttctgtcagctttgcgaagcgggatctgtttcattccattgatcttgatcctgccggctgtcatggggcttttgggggttcagatcgcccagacggtggcggatattctggcatttgctatctcccttcccctggctctggattttttgaaaaaattaacacccttggaggttgccaaggacagtgcggaaagtatatgatagaggatatagtaagaatcttgcaaaagacagcgtttgctatttccaattgtcagggaggatgtttccaatgaaaaaaaatgagatcataaaaatttatggaacggattataaagaaaacacgaaaaaattgttaaaggaagcagatctgatcagccatatcccctctaagagctgccggatcggcattaagccaaacctggtgtccgcctccacagccgactatggggccacaacccatccagaggtggtggcagggatcattgaatatctcaaggaaaatggctgtacccagcttgtgatcctggaaggctcctgggtgggagataagacctcagaggtgatccaggtgtgcggctatgaccgtctggcccaagaatatggagtggagcttattgatacccagaaggatacctatcatgcaaaggactgtgccggactttccattcatatctgtgacagtgtaaagagccttgattttctcattaatgttccggtgcttaaggggcactgccagaccaagatcacctgcgccctgaaaaatatgaaggggctgatccccaacaaggagaagcgccgttttcatgccacaggtcttcacaagcccatagcccatttaagtgttgggattcatcaggatttcattgtggtagaccatatctgcggagatctggattttgaggacgggggaaatccggtggtgagaaactgtgtgatggcagccatggacccggttctggtggatgcctatgtgtgccagctccttcattatcgggtggaggatgtgccttatgtgaaaatagcccaggatctgggaagcggctgtgcagacctgtccaaggcccggatacgcatctgcggccagaagaaggcgggccaggaagaggccctgccctatgcaagaaaagtggtggaggttcaggatgccgtggaggaggtggaatcctgctctgcctgttacggctatctcatccctgccctggataagctgaaggaggagggtcttctggacaagctggatacgaaaatctccatcggccagggataccgggacaaaagcgggaatctgggcgtgggccagtgcacctccaagttccgccattgtgtgaagggctgccctcccacagagaaccagatctacgacttcctgaaaacctacattgaggaaaactgccagggctgagtgagagtttttgttcattaagataaaaatgtgattattcttttaaatgcaccccccggtgctctacaatggtggaaaaaacaatctgggtactggtctttccaaaacgctgaagatggccgataaaaaggtccagctcagcggtactgtgaaaggccacctccagaagcatggaatagttccctgtcacgtgattgcattcaatcacgttggggactttttttatgtaggggtaaaataccgatttttgttctggctccatttctacattaataaaggcctttacatggtaatccagcttcagcagatccagctctgctccatatttttttatgatccctgctttttccagccgttcaatcctggcggacacggcaggggaggacaggaagacctgctgggccaggcttttcaggggaatgcgggcattttcctgaaggatgtttaagatttgccggtcaatgtgatcaagctccataggggtactcctttttactttcagaatattttatgaatattatatacacttaattttattaagtcaagacagggattcacttccttatttaggagggtgtaccgaatttcgttaagttgttttgaaaaggggaagggatcttgtgggaaaatctgggtgggtttataatgcagacaatcaaagaaaagcagtagattcacccttagcgggaaggagatcataaaatgaatacaagaacagaaacagattccataggaacgctggagataccaaaggaggcctactatggggtacagaccctgcgggcaaagaacaattttcctattacaaacaggcctcttcatcccaaattcattgagagcctggcaaaaataaaaaaagcggcagccatcaccaaccgcaatgcgggcacccttcccgcagagcaggcaggagccattatcaaagcctgtgatgagatcattgagggaaaattcgttgaccagttcctggtggacgccatccagggcggggcgggaacctctgccaacatgaatgccaatgaggttattgccaaccgtgccattgagctgctggggggagagaagggggactattcccttgtccatcccaatgaccatgtaaatatgtcccagtccaccaacgatgtgattcccacagccgggaagctgacggtgctggcccttcttcctgagaccgtgtaccagttaaagcgacttcatcaggtgtgtctgtccaaatcccaggagtttgaccatattttaaaaatgggcagaacccagcttcaggatgcggttcccatgaagctgggccagagctttcatgcttttgcctctgttgtaggcagggatatccagaggatcatcaaggcgggtgaggatatgaagagcattaatattggagccacagccattggaactgctatcaatgtaagccctgcctacctggaccacattacgcccaccctaggaaaggttactgggtattatctggagcaggcagaggatctttttgattctacccagaacctggacggctttgtggcagtgtcaaacgccttgaaaacctgtgcggtgaacctttctaaaatgtgcaacgatctgcgtctgctctccagcggtcctaagaccggactgggagagatcaatcttcctgccaagcagaacggctcctccatcatgcctggcaaggtgaacccggtcatcccggaggtggtcacccagatcgcttaccatatcataggaaatgatttgaccatcaccatggcggcagaggcagggcagatggaattaaatgcctttgagccagtgttgttttataatctctttgagtccattgagaccttaagccacggagtcatgactttggtggataattgtatggaaggaatcactgccaacgaggaggtgtgccagcattacttagaggagagcgccgggatcgtcacagccctgtgccccttcctggggtataagaaatctgccgagcttgccaagagaagccttcgggaaaatgtgcccatcaaggacctggtgcttcaggagaagcttctcacagaggccgagcttgccaaggtgctcaatgccaagatgctggcagagcccaagcatcaaagcctgatggaggccatttgatcttatcagcacaggaatatgcttgggaatatccggttaactttcaccaacgggatgcttttttgagaaaactgtgataaaatgaaggaaaatgtctatgagcctgcgcatgggagcatgcttgggcacatagccgctttccgggatttttacaataagtatatacagaaagggagtattccaatgaaagtattagtagtaattgatatgcagaaggactttattgacggagccttgggaacaaaggaggcacaggccattctgcctaaggtggaggaaaagattaaaggtttccaggggaaagtattttttaccagagacacccacggggaaaattacaaggatacccaggagggcagaaatcttcctgtgccccactgtatcaagggaactcccggctgggagatccatccaagtctggaggctctcagaacagaggagcccattgacaaggtgaccttcggaagcattgaactgggacagcgcctgaaggaagaagaccagaaggaaaagatggagtccatcaccctcattggactgtgcacggatatctgcgtcatctccaacgccatgatcatcaaaggctttctccctgagacacctcttgtggtggatgctgcctgctgtgcaggagtaagccctcagagccatacctgtgccctggaggccatgaagacctgccagatccttgtggaaaatcaataatacacaaagctgaagagataaacattcaaggggactatcggaatagatagcccccttactttagttctaaaacaattcgtaaactttccttttcagatacatggtaagcgctcctctccttaagtcctgcttctattgtaccaagttgctggcgcggcggctagcctcaaataacataatcgtgactttttctgtttcggaatgcactgggagtcaatccagtgcgtcttttaaattgtcgtataaaattagacatattgtggatacctacctcatttgctatgtgttctatgggaagatcggaatttatgagcaggatacaagcatgtctgattctcagctcaagaagatagtcattaggagtaaacccggtatactttttaaattctcttgtaaagtaatacttgctcagattcgcaaatgaagaaagcgagtcaagtgacagcggacgcatataattacattcaatatagtggatcacatatttaaaagtatctggaacagaagaattactttccttttctgcacggtccaacaaggaacataggagattggttaatgcattactgataaaaagattcctgtgatctgaaaacgtaatgtaggaatcaagcagtttctctaccagagcgttgaagctggtgcgtgcatatgaaatttgtacaatattctcacttgaaaaatgctgatagagtttatcggcattggaaccccatatatgaatatccatatgttcccaattctgtgcagcagcaaagtattcatgtggcctgcggcagtcaataataaatgcctgtccctcttttatcggataggtctgatcattgtatatcagccctccttcgcctgagtacgtgtacgataacaagagggaattgtaatccgatcgtttcacaaaagattcctttgtattgttcatgatacagaagctttgaagatataaggcatctgtactatcctgatgtgaaacggttggaagcagcatgtcaaaacttccggtccagcaatacgttgcaaattttctatcatttgaatcatcagcaattttggaccaattgatcgtgtcagaggaaatttcactatttttttccgtagataaagagagcagcccactatggtttgaagtaagagattttctgatttcaaaatggactaaatgatacttatcaaacataaaaacctcctgtttaaaaggcaagattgtataaattattggcaatataaatgattatatgtctgattttaacttgatataatataaaagtcaataaaagcatcctatacataataaagcgaatgatgaaaccagcaagaaaggaggataaaaaggatgggacaagcttttaatccttatttaccgcagcatgagtacataccggacggggaaccctatgtgtttggggacagggtttatgtgtatggttcccatgacagatttggcgcaccaatgttctgcatgaatgattatgtgtgctggtcagcatccgtgggtgatttaagcgattggaaatatgaaggtgtgatttttcgaaaaagacaggacccaaagaaccgccttgggatccggcttctgttcgcaccagatgttgccctggggccagatggaaaatactatttgtattacgcttttgattttatgggaatcatgggtgtagcaaggtcagattcacctgtgggaccatttgagttttacggtcatgtgcagtattcggatgggacgttgtggggaaggagaaaaggagacagttttccttttgatccggggattttcgtggatgatgacaaaagaatatacctgtactccggattttacacccccgtgccttcggttgtcactggattgcgttccctccgattccagggcggctatgtattggaattggaacaagatatgaagacgatttggcggccggaaaaactactgtttcccaaggaagggccaggggcttttgcagggcatgagttttttgaggcaagttccatgagaaagtacaacgggaaatattattttgtatattcttcccggcataatcatgaattgtgctatgcggtcagcgacagacctacatcaggatttaggtttggaggtacgctggtcagcaacggggatttgttcctgaatggaaacgaggatgagagtcatgcctcaaactatattggaaatacgcatggcggtcttctatctctcaatgggaaatattatatcttctatcacaggcataccaaccgcagttcctatgcccgtcaggcctgtgcggaagaacttataatgggtgaaaacgggctgtttcaacaggcagagatgacgagctgtggtctcaacggcggccccctcagaggaaccggggtataccaggcacggattgcctgtaacctatggtcaagaaaaggaactggaagatatgactgtaaaaatccgaagaaagagtttgctgacgctccgtattttactcaggataagcgggatggagacgagacagcagaacagtatattgcaaatatgcaggatggagcggtagctgggtttaagtactttcggatgaaggatactgctaagatcggcataagaatccggggaaacggaaaaggagttatgaacatatcctctcagccggattttgatagaatatgttcacaaatctcggttgaatcgcaaaaagactggcattgggtatatgggctgttgaaatgtgaggagggagtaagagcgctttattttcagtatattggttccggcagtgtggattttggagcatttgatcttgcgattgataggtgaatagaacacagaagatttaatttgtagagaggtaagcatatggaaaatgaaatgtttgatttattaaaaacaggcacgataattattggtattattatagctgcgctgtcagtattgttccttgtattggcagtcagaggccagaagctgggaaagaaaaaggtattgtttaatattactgcatcaggggtggcagcattgagtcttgttgttattattgcggtaaatgtattgacatcaatgtatagtggatcaattgactctaatatggcagagactccaaaaggagcagaatcatcagataaagagaagtggaaagaagcagcctactcaatcgcagaggaaggaatggttcttttagaaaacaaaaataatatattgccattgcaggacacgaaaaaagtaaatcttttagggtactttggatataatcctatttatagcggtacaggatccggctatgtcgaagcatcggattcctgtgacattattacagcattaaataacgttggcattgaggtaaacccagcggttcaagcgtctgaaatatataaagcagacgaacaagaggttcaatggtatactatgatcctgccgaattttgctttgcatgacccatccatcgaagcttatagcggagacatttcatttgaaaaaatgaatgaatattcggacactgccattgttgttctgggcagaagaggtgcagaaacaacggatatgccggagggctctctacatatcacccaggaagaagaagcgttgttgaatgcagcctgtgagaattttgaaaacgtgattgttctgattaacagtgcaaatattctggagatggactggaagaataaatatgatgtggatgccattgtgtggacagggctgccagggccgtatggtttcaaaacgttgggtgaaattttaacgggagcggtcaatccctctggaaaactgccggatacatgggtatatgaccatgacagtaatccggttagtgagaattttggggaacagccggctgaaaatgaggaaggccgccactatgttgactatgtagaaggtgtttatcttggttataagtggtatgagacagcatatgcagaagaggctgtgattaccaacacaaagacgggagaaacctttgattacacggattatgaatcaatcgttgcttatccgtttgggtatggtttatcctatactacattttcacaggagattaccggtggcactttgtctaagaatgagaagctggaagccacaggaaaatatacgttggaagtcacggttaaaaataccgggaaggtggcaggaaaaaatgctgtacaagcctatgttactgttccatatacagaatatgatagaaagaatcagatagagaagccggaaatttcattagttggatatgggaagacaggacttttggaacctggtgaatcggaagttgtaaccattgaattttctttggaagaaatatcttcatatgacagatcctatgataatggtgatggaacaaaaggagcatatatgctggatgaaggggattatgtatttagcattcgttcagatgcacatacagtagtggacagtatcactgcagatctgcaagaacagcattatttctccggagcagacaaacgtgcgggtgatgtacaggtggcggtgaaccagttcgaagacgctgaaagaggtgaatatctgtcacggcaggatgcgtttgctaattatgaatctgctatgaatgcagttgaacctacagtgaaaagtatggattatgtgaatatggataatgaatatgatccggcttatgatgacgtgatcaccaaagaatataaagagggcgtggattatgcagcaaaaggtgatctgaagttggaagatatggcaggggtggcttatgacgatccaaaatgggagcagtttatttcacagatgacaatcgatgagttgttgcttcttacaggtaaaaccatgtatacgtcaccagggattgagtctgttggaaaacctgtaacagtggatgcggatgggcctttggggctatcttgtttgatgaggcaggcaacctttgattctatttcattcccgtgcgttccccttctggcagcaacttttaataccagtctggcatatgatatggcaggcagcatagcagatatggcaaaactaaatggtgttaccatttggtatgcaccagcgatgaatatacatagatttgcctatagcggccgcaattatgaatatccttctgaagatacactgttgacggcaaagacagcggcagcggagacactgggtgcaagggataaagacattattgtatatagcaagcattgtgcattaaatgatatggaaagtatgcgtaataccatacatgtttatagtaatgaacaggcaatccgtgagatatatctaaaaccatttgaatattcagttaaatatggaaatgcaaatggtgtgatgaccagtcagaactatattggtgatgtgtacgccggagggcatgcaggtctgctcacggaagtactgcgagatgagtggggatttatcgggatggtcatgactgatatggatgaagcggaagaatttaatcattctttctggacgaatatccgggcaggattggatgtctggttggcaatgggggattctgacattgcgccgagatcagatgcagatatttattatttgcaaagagccgcccataatcagctttacacttacgcaaataacagtatccaggcggcaactattatgaactggcgtggacaggtgcgtgtcatcagcattgaacttggaattttactcttagcctgtgcggcagcgcttgttattcgcaataaaaagaaccgtgtaaggcaggagggaagatgacacacattatcacttggtggagaaaatttaaagagaaaagtcctgtgatcgcaaaatgggtacgagagggcggcttgttcattatagtgtgtaatttgatcactgttttcaagtatcttctcctgcaatttcttccctccattttccgaagtctgccagtggtggacttcggatggccgggtataccgctgactcttttcggagagacctttcagtggaatattattggctatgatgcggtacatggaggactgccttacttctgtgcttatatcattgcaatgctggtgggggagtgctgtaattttcctcttcagcgtaatattgtattttgcagcaaaggaaatgtctggtatcaggctttatggtatctcatcgctttttgtatcgtcacatgtatcgttaattccattaattgtatatgggtggcggtggctggattatttgtgccggattatatatacaacattggtacaacggtattaaacggtgggatatccatggtgattttcttttttgtgaataaaaaaatattttaattattatttggttggtgaacacaaattcaattaggacaacctcttatgtattctccttgtgtcacgactgaaggtaatctatggcaaaggcagcgtacatgcggcttcctttttccagagcagcctcatccaggtcaaagcattcgtgatggaggggataggaggtggcggctgttccgtcgctggtgcataaaaagagcattccttcttaatttcacaccctctataacaaagaggggtgaaatttgagggaatgctcttctatatttagaatttcttccaggtatccttcacaaataacagtagcaacgggaaaatctccagtcttccggccagcatgtcgaaaatcaggactgcctttgctccaaaggaaaacatggcaaagttgctggaaggacctaccatttccaggccgggtccaatgttatttaaggtggcagccacggcggtgaagttggtggtcaggtcaaagttgtcaaagccgatgagcagcaccgagaaggagaagatcaacacatatacgatcaggaaaatattggtggaccggaccacctcatgggggatggccttgccgtccatttttattttcttaatggcattgggatgaaggtaaatatgaagctccttgttgatggtctttaaaaggatgatcaatctggagaccttcattccgccaccggtgctccctgcacaggcgccgataaacatcagcatgaccagaaccgttctgggcacctggggccaggcgttaaagtccgtggtggagaaaccagtggtggtgatgatggagccaacctggaaggaggcatgctggatggcattggccaggctgtcatacaagggacgcagattgacggtgatcaccacaatggccgccaggatgatccccaggtagtagcggatttcctccatgtgaaaggcctgtttgaatttcttcgtgagaatgagaaaatagaaggaaaagttaattccaaacaggatcatgaaaatagtggtcacattttggatataaggggaatagcctgccaaactgtcatttttaattccaaatccaccggtgccagctgttccaaaggcagtggtcagggcatcaaacaaaggcattcttcccgccagcagcagaaggatctgcagcaaggtcagcccgaaatatatagcgtacaaaatcttggcagtggagcgcacctttggaaccagacggctcacagagggacccgggctttccgccttcatcaggttcatattgtagcctccggtctggggcagcaagatcaatatgaacacaagaacacccatgcctccgatccagtgtgtaaagcttctccagaacaaaatgcagtgagagagagactccacatcactgaggatgctggctcctgttgtggtaaagccagaaaccgtttcaaacagagcgtcaatggggctagaaatgctcctgctgaacaaaaagggcagcgagcccataatactcagtacaatccagctcagagccacggtcacaaagccttcctttacataaagcaccttattctttggctttctggagagaagaggaaggcccacagccaggcaaagtgcgatggtgagaagaaagctgaacccctcaggctcctggtaaataatggcaacaatgccgggaagccccataaaggcggcttcaaaagtaagaatccaacccaaaagataaatgataacggaataattcatatgcctgtctccgactattccataatgtcctggatgtcgtttaatcctttctgagtagttacgatgatcacagtatctcccacttcaatggtatcatttccacgaggaatgaaaacattgccgccccggttaatacagcagatgagcagattccgcttcagggaaagctgggacaggggaacgcccaccacgggagaatcatggatggcgaattccagggcctctgcccggttgtccagaatgtgataaagggtctccacattgctcccaatggagttcttcagggaacgtacatactgaaggatatagtccgcagtaatgtattttggatagatgacgcttccgatatccaggctgtcaataatatcatcataggacagacggtttaccttagccaccagctttgctttggaaatggtcttggcaaaaagagccagaaaaacattttcttcatccaggctggtgagagtcacaaaggattccgcatgggcaagtccctcctccaagagaagctttcggtccgtgccgtctccgttgatgatcgtagcgtcagggagaagctcgctgagctgctcacaccgttccttgctgttttctatgatcttgacgccgatattcatatctgacagttgtctggccagatagtaggcaatggttccgcctcccaccagaatggtattttttacctggttggtcttcaggccgatctttttgaaaaagctgcctgcagtgttgggggaagcgatgatggacagggtgtcattgtcctggaggataaaggagccgtccggaatggtgatgctgtcatttcgttccacggcacataccaaaatgtcgcagcgcagtttgtctgccatctgaatgatggagtagccattcaggccgaattccggctttagtttaaatttcagcagctctaccttgcctttggcaaaggagtcgatctttatggcagaagggaatcgaagaagtctggagatctcatgggcagccgccagctccggattgatgatcatggagattcccagccgttccttgataaacatgatttccttgctgtaaataggattgcgcacacgggcaatggtatggcaggttcctgccttctgagcgatcaggcagcacagaagattcatttcatctgaacctgtgacagcaatgagaatatctgcagtgtcgatgcctgcctccactaaagtattaatgctggcgccgtttcccaccaggcccatggcgtcaatatcttctgagagggctgagattttatctgctctcatgtcgatcaatgtgaggtctatttcctcttcacttaactgttctgccagtgtacggcccaccttgccgcaccctacaataattatctgcatgatttcctccgcacgtatataatattttcttgcaccaaaaaaagtatctctacggatacaaggccattataccattgaaaacagaaatagggaacacaaattaaaaattatcctggagttttcggggggattcttgtgcttcctcctattgtgtgctatgatttccagggaaatactgtccggcacagccttgtgtctggaaaagtaaggaaatcaggatcatgaaaataggatatggaaaacaatgaatatattaacagcagataatatcagtaaattttatacagaaaaaaccttgctggacaaggtctccttctctctccaggagggggaaaaggtgggagtcatcggaatcaacggcacgggcaagagcacccttttgaaaattttatcagggctggaacagcccgatgagggaagcgtagtgacggccaatcatgtgatcgtgcgctatctgccacaggatccgcagttttcccagaaagagactgtgctccagggagttttgagaggaaatgtgaccaaggccaatcagtggaacattgaaagccaggcgaaatccatgctcacaaagctgggtgtgacagagtttgacaaggaatgcgccgccctgtccggaggagagaagaaacgtctggctttggtctctgtgcttttgtcagaggcggacattctggtgctggatgagcctaccaaccatctggacaataccatggcagactggctggaggatcttttgaaaaactggagaggggcctttgtcatggtcactcatgaccgttattttctggatgcggtgaccaaccggatcgtagagatcgaccagggaaagctttactcttaccaggccaattattctggctatctggagctgaaaatgctcagagaagacatggagcaggccagtgagaggaagcgccggtccatattaagaaatgagctggcctgggtcatgagaggggccagggcccggtccacaaagcagaaggccaggctggagcggtacgaggatttaaaaaatcagacaggccctgcccaggaggaagccgtggagctgagttcagtgcagagccgtctgggccggaccaccattgagctggagcatattgccaaagcttatggggaacgcacccttattaaggacttttcctatatttttttgaaaaatgaccgggtgggcttcgtgggaaaaaacggctgcgggaaatccactttaatgaagatcatacagggagagatccagcctgacgccgggaagcttatcatcggccagacggtaaagatcggttattacgcccaggaggtccacaaggagatggatccttctatgagggttattgattatgtgaaggatatcgcagagtttctgcccacccaggagggacttgtgagcgcctccaaaatgctggaacgcttcctttttactggggagatgcagtatagcttcataggaaaattatccggtggggagaagcgccggctgaatcttctccgggtgcttatgggagcgccaaatgtgctgattttggatgagccaaccaatgatctggatattaccaccctgaccattttggaagattacctggaccattttccggggattgtcattgccgtatcccatgaccgctattttctggaccgcaccatacgcaggatttttgcctttgaggagggcggggtgctgcgtcagtatgagggcggctacacggattacagccagaaaagggccgaagaggaaagacctgtccagacccaggtgccaaaagtccaggaaaaaagccaggacagccaggagttcacccttgcccagaaaaaaggccgggtgcgcaagttgaaatttacttatcaggaacagagggattatgagaccatcgaaggggatatcagccggctggaagacaaggtccaggaactggaagagaagattctggcctctgccagagattttgtgaagctcaatgagtatacaaaggaaaaggatgaaaccgagcagctcctggaggagaaaatggagcggtggatgtatctggaggatttggccaagcagatagaaggaggggaagcccaatgagcagaagccccatgacaaccctgtgttatgtggagaaagaggatgcttacctgatgatgcaccgggtaagcaaaaaaaatgatgtaaataaggataaatggatcggtatcggcggccattttgagcagggggagagtccggaggattgccttctaagggaggcaaaggaggagaccgggctcacccttacctcctggagattccggggccttgtcacctttacccaggagggctacggtacagaatatatgtgtctgtatactgcggacggatttcagggagagcttaccagctgcagtgagggagttctggagtgggtgaagaaaaaagacctgcataagctgaatctgtggaccggagattggatcttccttcagctcatggcccaggaggctccttttttctctctgaagctgagctacaagggagatgagctggtgaccgcagtccttaacgggactgctttgaggcttcccctggctgtcaatggggaggatctggcatttttagaagaatagagtactttttttgcctatctattgacttttccatcccaactttagtatgatatccattagagtttaggaggaaaaaatatggcagaactggtaaaagtagtagtagacgccatgggaggggacaatgccccccaggagcccgtgaaagcagccgtggctgcagtgaaggaaagagacgacattctcgttctcctggccgggcaaagaccggtgatcgagaaagagcttgccaaatatagtgattaccccaaggagcggattcagatcgcagaggcatcggaggtcattgagacagcagaacccccggtgatggctattcgtaaaaagaaggattcttccatcgttgtgggattaaatatggtgaaaaagaaggaagcagatgctttcgtatcttcaggaagcaccggagctgtccttgtgggaggacaggttctggtgggaagaagcaagggcgtggagcggcctccgctggcacctttgatccccaccaccaagggagtatccctgctcattgactgtggtgccaatgtggacgccaggccgtcccatctggtacagtttgccaagatggggtccatttacatggaaaatgtggtaggggtgaaaaatccccgggttgccattgtaaataacggcgcggaagaagagaagggcaatgctctggtaaaggagaccttccctttgttgaaggcctgtccgggaattaattttatcggcagtgtagaggccagggatattcccagcggttatgcagatgtggtagtgtgcgaggcttttgtgggaaatgtgatcctgaaattatatgaaggcgtgggagcagctttgatctccaagatcaaggagggcatgatgggcagcctgcgcagcaagctgggagcgctattggtaaagccggccttgaaaaacaccctgaaaacctttgacgccagtgaacacggaggcgcccccctgctgggactgaaggggcttgtggttaagacccatggaagcgccacggccgtggaaatgaagaatgcgatcttccaatgtatccagtttaagcagcagaagatcaatgaaaaaatcgccgagcatatcctggagggacaaccatcccagacacaggatacagccaaatagaaaacaaatggaagaagaaaaaaagagaacagcggcaaaggaggggtggatgtggaactggagaagctcaaagctattatagcagacgttctgaatgtagatcaggacgaaattaccgaggaaaccacatttgtggatgacttaggtgcagattccctggacgttttccagattattatgggaattgaagaggaatttgatattgaaatcgacagtgaaactgcagagggaattacttctgtggggtctgcggcagaagcgatcagaaatgcgatcggttcataaggcacctgtacccggcagggaaggggctgtgactgggattccagtgaacagtgtccgtgggctgtctatcatacggaggcttacaaacgggtgctgcatttagcagcacccgcatcttttgaaaggatggaggcaatgagtgtaaatttaacaggattggaaaaaatcatcggatatacctttaaggacaagagcctgctgagacaggccatgatccacagttcctatgccaacgaaaagcggctgggcaagcgtgcctgcaatgagcgggtggaatttttgggagatgcagtgctggagatcatcagcagcgaatatttatataagaaatacccggaccttcaggagggagaattgacaaagaaacgggccagtctggtatgtgagcccacccttgccatgtgcgcgcgagagtttcatctcccggaatttctgctgttgggcaaaggagaggagcttaccgggggaagaggaagggattccatcgtatctgacgccacagaagcgcttattggagctatttatctggacggtgggtttgctagtgcaaaagaatttgtcatgggattcatactgaatgatatggaacacaaacaactcttttatgatagcaagaccatcttacaggagatcgtccaggagcacgggcagaacccagttgtctatcagcttttgaaggaggaaggaccggaccacaacaagatatttaccgtggaggccctgctgaacggaaagacggtaggacagggcagcggccacaccaagaaggccgccgagcaggcagcagcctatgaggctgtacgcactttacagaaaaagtaggtgacatatgtatttaaagagcattgaagtgcatggatttaagtcttttgcccagaagatccattttgaattccacaacggcatcacagggatcgtggggccaaatggcagcgggaagagcaacgtggcggacgcagtgcgctgggtgcttggggagcagagcgcaaagcagcttcgaggaggcaacatgcaggacgtgatcttctctggaacagagacgagaaaacccctgagttacgcttctgtggccattaccctggacaacagcgaccatgagctggccattgatttccaggaggtgacagtcaccagaagactgtaccgttccggggaaagtgaatatctcataaacggaagcgcctgccgcctcaaggacatcaatgagctgttctatgacaccggtatcggaaaggaaggctattccattatcggccagggacagatcgacaagattttaagcggcaagcctgaggagcgaagagagctttttgacgaggctgccgggatcgtaaagtttaaaagaagaaagaataccaccttaaaaaaactggaggaggagcgccagaacctggtccgtgtcacggatattttaagtgagctcaccaaacaactgggacccttggagaagcagtcggagacagccaggatctatctggccaagaaggagactctaaaagagctggacgtgaacatgtttcttctggaaaatacccatatttccacccagcttcaggaaatcggggaaaagaaccagctggcagagtccaacttaaaggaagtccagattcaatatgaaaagaccaagacggagtatgaagagctggagcaaaagctggagaacttaaataccagcattgagcaaatgcgggagcagggaaaacaggacgctctgcgcaggcagcagctggaggggcagatcggaatcctcaacgaacagatccatgcaggccagctcaacaatgagcactatcaatcccgtttgtctgccatttcccaggaggtgtccagacgaaaagaggacctggatcactatgaagaggaggattctctctaccgcttccagttaaaggaagccaaacggcggctccatgaagaagaaattcagatggaacgggtcaccggagagatcgaggcctgcacccaggcagttgaggagggaaaaaacgagatcatcgagatcctcaacagccgggccaataccaagggaagtgcgcagagataccgggccatgaaggagcaggtggccatccgaaaggctgccttaagtcagagaaccttgaagttgaaaagcgaggagcaggagcagaaagggtatctggataaggccagggaggaataccaggcagtcacaacccagatccaggccatgaaccaggaggagcagcggctggaggagcaggtggacgccctgtcccagaccctgaagaaccagaacagccagatggaggtgggccagactgcttatcacagagaggcttcccgtctggaatccttgagaaatatcacagagcgttatgacggctatggcaacagcatccgccgggtcatggagcagaagggacgcgtttccggaatccatggagtggtggcggatctgatccaggtggagaaaaattacgagctggccattgagaccgccttgggaggcagtatccagaacattgtcacagacaatgagcagactgccaagcagatgattgaatttttgaaaagaaataaatatggacgggccactttcctgcctctcacagccatcagcaccagaggggagtttaatcaaagggatgccctgaaggagccgggagtgatcggtatagccagcagtctggtaaaggtttccaaggagtatgagggcttgtcccggtatctgctgggcaggatcttagtggtggataacatcgatcatgccattgccattggaagaaaataccgccattctctgcgtatggtcaccattgagggagaatccctgaacgcggggggctccatgacaggcggtgcctttaagaataacagcaacctgctgggacggcgaagagagatcgaagagctggaatccagcgtgaaggccttaaaggcagacatggatgccatgcaaagagacatcagtgaaaaccgcagcaggagaaatgtgcttcgggacacggtggcagatctgcgggagaaaatgcagtctctgtatatccgccagaatactgcgaagctgaatattacgaaaatggaagaaaaagcccaggagatccagtccggctatacatccatcaacagagagcagcaggacatcgcccagcagatgaaggagctggaggttcatgatgcagccattcaaaaagagctggaggattcccagaaggatgaaaaagagctgaataccttcatagagagccgccagaaggagctggatgagcagaaggctctggagagtcagcttgtgaaaaagctggaggaactccggatggaggtatccactctggagcagaaaagccggttcttgaaagagaatgtacagcgtatccagtctgaaatcgctgcctaccaggaggaggaaatgggacttcaggaaagcctggcccagggcagcaaagagatggaggagaaacatgcgcacatagagcgcctgcgccaatctatagaggagacccaggcagaggaacaaaaggccagggaggagatggagaagcttctaactgaccgggaggccatgaatacctcccacaagtcctttttccagaagcgggatgaactgtcaggacagatgaatggactggataaggaatgtttccgcctgaggggacagctggaaaagctggaagagaacagggaaaatcttatttcctatatgtgggaagaatacgagatcacccccaacaatgcccttacctaccaaaaggaggggtactcggatcgaggcgagttgaaaaaggggatcgcagccatgaaggatgagatccgaaagctgggtcctgtgaatgtaaacgccattgaggactacaaggaactaaaggaacgtcacaccttcttatccggccagtatgaggatctgaccaaggcagaagccacccttatggatatcattgatgagctggacgatggtatgcgccgccagtttactgagaaattccaggagatccagcgggagtttgacaaggcctttaaggagctgttcggaggaggcaagggtactctggagctggcccaggatgaggatattctggaggccgggatccggatcatctcccagcccccggggaagaagctgcagaatatgatgcagctctccggcggggagaaggccctgacagccattgccctgttgtttgccatccagaatctgaagccctcccctttctgccttttggatgagatcgaagcagctttggacgattccaatgtaagccggtttgcaggttaccttcagaagttgacgaagaacacacagtttattataataacacatagacgaggcacaatgaatgccgcggaccgtctgtatggaatcaccatgcaggagaagggcgtgtccactttggtctccgttgacctggtggagagcagcctgacaaaatagccgtgaaggaggatgtgtgatggcagaggaaaagaaaggcttttttaaacggcttgtcagtgggttaactaagacccgggataatattgttgctggatttgattccattttcagcggctattccagcattgacgaagatttctacgaggaattggaagaaactcttattatgggagacatcgggatcaatgccacgaccgctatcctggataagctgaaggaacaggtaaaggaaaagcatattaaagaaccggcagagtgcaagaagctgctcatggacagcatgaaggagcagatggcagtggatggtatgaactatgaatttgaaaaccggaagtctgtgatcctggtcatcggggtgaatggtgtgggaaaaactacctctgtgggcaagctggccggcaagctgaaggatcagggcaagaaagtgatcctggctgcggcggataccttccgggcagccgcaggagaacagcttaccgaatgggcccaccgggcaggggtggagatcataggaggacagaacggggcagacccggcatctgtggtctatgatgccgtggcggcagccaaggccaggaatgcagacgtgctcctgtgcgacactgctggccgtcttcataacaagaagaacctgatggaggagcttcggaagatctaccggatcctggagaaggaatacccggaggcttatctggaaaccctggtggtcctggacggaacaacgggacagaatgccctggctcaggccagacaatttgccgaggtggcaaatgtgacaggaatcattctcaccaagctggacggaacggccaagggtggaattgcggtggccatccagtcggagctggatattccggtgaagtatatcggggtgggagaaaccattgacgatttggagaaatttgatccagatgcgtttgtgaatgcactgtttaatgttaaagaaagtgaagaggcagaagaataagtatggaaatgctcacattggaggcttttgagcaggcctcagaaatagtaaaaaaagttacccaggagacgaaactgattaaaagcagctattttaccgagcttacgggcaacaaggttttttttaaaccggaaaatatgcagaggacaggcgcctacaaggtgcggggggctttttataagatcagcactcttactgatgaagagaagaacagaggcctgatcacagcttctgcaggaaaccatgcccagggcgtggcttatgccgcccagaaatttggctgtaaggcagtgatcgtcatgcctaccaccacccctcttattaaggtggagcgcacgaaaagctacggggcagaggtggtgctccacggagatgtgtacgatgaggcctgcgcccatgccctggagctggcgcagcaggaggggtatacctttatccatccgttcgacgatccggctgtggcaaccggccagggaaccattgccatggagattgtccaggagcttcccctggtggattatattctggtgcccatcggcggcggcggactggctacaggcgtgtccactttggctaagcttctcaatccccatattaaggtgattggcgtggagcctgcaggagccgcctgtatgaaggcttccctggaaaaaggagaggtggtggggctgcctcatgtgaacaccattgcagacggcactgctgtacaacgaccgggagaaaagattttcccttatatccaggagaatctggattcgattctcactgtggaggacgatgagctcattgtggccttcctggatatggtagagaaccataagatggtggtggaaaattccggtctacttacagtggccgcccttcgccatctggactttaagaataagaaggtggtgtccatcttaagcggcggcaacatggatgtgatcaccatgtcctctgtggttcagcacggactgatccagagagaccgtatcttcaccgtgtctgttcttatgcctgaccgggccggcgagctggtgcgggtagccagcattattgcagagaaccagggaaatgtggtgaagctggaccataaccagtttgtgagcaccaacagaaatgccgctgtggagctgaagatcactatggaggcttttggaactgagcataagaatcagattgtgaaggctttggagaaggatggttaccgtccgaaggtgatccgggccagcctgtaagaaacttctaagaagcataggaagatatttacaaataagaagagggtattccctttctctttgtacttctgtccataaggcagaagacaggagagatggaataccctcattttttaaccgggtgaaagaaatttatttcacttcaatgatctcataatcggtgctgccaagtcccagcttcactgcatggtcgatacagcttctccagttggtggtggggaagatggcgccgaaatggtcgtgtccctcatgatctgcctcggacagggcggtgccggaaattggaggctgggcatttactgcgtctgcacaggccagatccagggccactgggtcaaaggaggcgaaaaagcccacatccggaacaatggctgcgtcattttctgcatggcagtcacagtagggagatacgtcaatgaccagggaaatatggaaattggggcggccgtctatgacagccttggtgtattcggcaattttgcagtttaagatatcattggattcgtcggaggcggccacaatggcatcttttggacagacaccgatacatcttccgcatcccacacatttgttgtggtcaatgaatgccttgttggcagtgaacaccggggcgtcatgggcgcagatcttggcgcagcgcttgcagccaatgcatttgtcctgctctactaatggttttccggcactgtgcatttccatcttgccggctctggagccgcagcccatgcccaggttttttagggcgccgccaaagccggcggcctcatggcccttgaaatggttcagggagatcacaatgtccgcatccataatggcccggccaatcttggcttcctttacatattcgccgccttccacaggcacgtattcctcatcggttcccttcagcccgtctgctatgagaatgtgacagccagtggagaagggagagaagccattcacataggcgctttccagatgatccagtgcatttttccggccgcctacatagagggtgttgcagtctgtgaggaaaggctttccgcccagttccttcacggtatccacaaccaccttggcatagtttggccgaagaaaagccaggttgcccggctctccaaagtggattttgatggctgtatatttatccttgaaatcaatatcaccaattcctgcttttttaataagacgttcaagcttatttaaaagtccatcattgaatccggtccgcaggtttgtgtagtaaacctttgatttattcatggtaaattcctccttatgtttttcatatatgataacacttcacaggtatagttggcaagaaaattatggaagcctgtccgggggggatggtgtggattggctggaaggctgcaggaccttaggttgaagtaaatagaataaagtctgttcatcttttgtgaagcaaactattctttttcctggccggttaaatatgttacaatatacaaaaatggtaatgtagacaaagctgatagttaaaggggtgaaaaaatgaaccaaagaacggctgccatcattcaggaattgtgtaaacttgagaagaatattacaatatatgatttggccggacagtttgaggtatctcaaagaacaatccgaaatgatttaaacagcattaatgaattgctgagaaagcatgaattgccagagctcatattagaaaagggcggtgagatccgtagagacgatatttttctggaaatttcatcctttatttctgaaaaaaatttctatgagtataagctgtcaaaagaggaacgaaaaaagattgcatctgccttattaattggttcatcggaatatattacgctttcagtcattgcagataatttatttgtgagcagggcgaccattattaatgatttggatgagataaaggcttttataaaaacaggcggtctggaagttatatcccatcccaataaaggtctgcgtgtgaacggaaaagaaagtgataaacggttatttctaatgaaactggcagtgtctcagccgaatttggcgcaggaggatatggttatccggcatataaatgtccaggggggaaaccgaattgtaattcaaaagatagtattagagcaggaacatattcataaaagttttctcacagatgattcttttcaaaagatcttactttatcttggaattatggtaagccggaaccagcagggggaatatatcgaggtgagaaaaaagagtgataacagtaagtttctcatggcacaggacatcttgaagtatatttctcagtattgccagataaattccacagaggatgaagtccagtttttaagcgaaatattggtgatggccagatatatgaagcaaaaatcatataacaaagatgctattaagattcagctgatcacacgtcagtttattgaacatatttcagaagaattagaggtgaatcttaataatgattatgatttttttgaaaatctatccaatcatctagaatcagtgtttaccgcatcaatacctgcctatcctgaaaatcaggtgattaatgaagtattggaagaaaaccaagaagtggtggcagcagttcataaattgtttcctattatcagacagtatataagccgggatattcaggaaatcgagattggatatattgcagttcatgtatgtgcggctattgagagaaaaaagaacaaggagattgcgtttcacgtgatagtggcctgtcacggagggattggaacttccagacttttgctggaacgtctaaaaaaacattttaattttcagatagttgatattatttcgtcacacgaggcaaagaatctggaaccacatgcagcagattttattatttctacggtgccattaaaaggctgtaagctggattatgtaacagtttctccattgcttaatgatgcagattatatcagagtagggaataaaattgacacactccgaaacagcaggcatctgccatcccgcttagaagagaaagaaattacagcaaaagggctgctggagaaaatcgcacctgttgtttatgatactgtgccagaaagtgcatatgaccttatgaaaaaattaaaaaaggcagtgcgggagtatttcaggcagcccatagaagcagaagcggaaatatttgcgccctatctgcataatctgctgcctgcttcacatatacagctggatgtggaatgtgaggattggaggcaggcagtgaggagatcagcagaacaattattacgccttgggtatatagaagaacgttatattcaggcaatgatcgtcaacattgaggaaaatggtccctatattgtgatttcaaaaggatttgcagtgcctcacgaaggcttggagcaaggaagtgtaaaggttggaatgaatctcatacggttaaaaacgccggtggattttggagatgaagaacttgatccggtagagtttgtctgctgtttaagtgcagtggatcataaaacacatttaaaggcgtttttcaatttggttaacattttaaagagagaagattttaagaaacagcttcatgattgtaaaacaccactggaagcctctctgttgatagaaaagtatgaatatgaagcggcagaatagctaaaacagaatggttgattatttttcctaaatcatggaaataaaatcaaccattctaattttttgcaaaaaagagggaaatacctttgactgtttttctgtgatactccgtgataggatatagttaaagaaagagaaatcagctggttatcaatcttaaatagaaacaagaggaggaaatatcatgatttgggaagagcttagaagttccctgattaggacagaagtggaagccaaatcctttgaagacgtcatgcatgagataggtggaattttagttcaggaaggatatgcaaaggagtcctatgttaaggctctgattgccagagagaaagaatttcccaccggattggatgtagacggaataggagtttcaatccctcacacggatgtgagccatgtaaacaaggctggaattgccatcggagtactaaaacagcctgtaacttttactcagatgggtacggatgatgaaacagtagaagtccggctggtgttcatgttggcggttgtggaccccaatgaacatattgatcagcttcaaagagttataactattattcaggatacaaatgttttaaaccaattattagatgcaaaagatgcagagcagattataaaaataattagagaaaaggagaaatcattatgaaaaagaaagtaattgtagcatgtggcggagcagtggcaacttcaacaatcgcagcaaataaaatagtggaattgtgcaagaagaacggaatagacgtagaaatctgccaggtacgaatttcagagattgaatcgaatcttccgggaactgctttgatcgtaaccacatcaaaagtaaaaagagattatggagtgccgctgattacgggaatgccatttatttctggtgtaggtgtggaaaaaacggaacaaagtattttaaaggtgcttcgagaatcataaaaataagggggatatgggaatgttacaggcgttttcagatgctattcaatatattatcgatatgggagcttccgtcatgcttcccatcgtcattgcaattatcagtgtctgtatcggagtcaaggtaggaaaagccattcgctctggtttaatgatcggtgtgggctttgtggggctgagtctgatcgtggacatgatgaatgcagaactggggcctgcggctgcagcaatgtcagaaaagtttggattgtccttaagtgttgtagatattgggtggccgggagcatcacctatgacatgggcctccaatattgcaaccatagcaattccgttagcaattctggtaaatattcttatgcttgtgctgaggctgacaaaaaccgtaaacattgatatttggaatatttggcatatgacattcacaggcgctattgcttatgcagtcaccgggaatttctggatcggaattcttggggttgcagttcatgcggcaatctcttataagctgggtgatttatgggctcccttgatgaatgattattttgagctggacggacttactgttcctcatggaactgctgcttatatggcgccgatagcctgtgtggctgatgctataattgataaaattccgggactcaataagatagatattaccgctgattcattacaggaaaaagtgggagtgcttggagagccgattgttatcggtggtattttaggagccatggtagggtttcttgcaggatatggtccccaggaagcattgccgttaggggtgaagatgtctgcggttatggtcctcatgcctaaaatagtaaaatgcattatggaaggacttatgccgctttcagaaagggcgaaagaactactgacaaaaaggtttggaaacagcgagttttatataggattagatcctgcaattttactgggagatccacaggttgtaactacaggactgatttttatccctcttactcttcttattgcggttttagttccgggaaacaggatcctgccctttggagatctggcaaccattggattttttatagctattgcagtagctgtacataaaggtaatattttccgttctctattttcaggaagtgcaattatgttcatgactatttggatagccaatcaaaccattccatggatgacaaaattggcacagacaactggaagtacagatggaagtaacctggtggcggcattggatcagggcgggtgtcccattacttatgtgttcacgcagatttttaccagagataatcttatggggatgggcgtggttgcagtgatttatgtggtatgtctgctgtttgctgtccggtgctcgaagcaaagggcagcggcggcaaaagaaatagaagaatagaaaattaggttggaaaggaatggattaaatttatgaaggcaggagttgttcatgcgagagaagatatacgatatgaagaaattaaaaagccggttccccaaaagggtcaggttttgatcaaggtaaaatatacagggatttgcggttctgatgtcccaagagtaaacggagatgcctgtcatttttttcctaatgtgcttggacatgagtttagtggaaccgtagtggaagtgggagaaggtgttacgtcgattaagacaggcgacagagtggcaggtgtaccgcttgttccgtgtatgaaatgtgaagactgccagaagggtgactattccctgtgtaaaaattacagctttattggttccagagagttcggaagctttgcggagtatatagcagtgccagagcgaaatgtggtgccatttgaagaaacggtttcttttgaacaaggagccttctttgaaccggcaaccgtagcccttcacgggctgaaacaggttccttacgaaggtggaaagacagtggcgatcctgggcggaggcactatagggatgtttgttatgcagtgggcaaagattttcggagcaagagaggcagtggtatttgatattatgcaggaacgtcttgctttgggaaaacgtttgggtgctacaggaggaatcaatactttagaccaggattttatgaatcaggcaaagaaattaactggaggacgagggtttgattatgtatttgagacagccgggaatacaataacaatgaaaatggcttttgagctggcagcaaacaaggcacacatatgttttgtgggtactcctgccagagaactctgctttacggttgaggaatgggaaaatatgaatcgtaaggagtttactctcacaggctcatggatgtcttacagtgctccttttccgggaaaagagtgggagcttgcggcacattattttaaaacgggagatttgaagtttgatgagtcttttatttttaagaaaatgccccttagcaggattgcagatgcgtttgaaatgtacaaaacaccaggtacagtcaaaggaaagattttaattgacagtgaagtataaaggagagttctatgattacaacggttacattgaatgcatccattgataaagcatatgaaatccggggaagcatagaaaacggaacagttatgcgggtttctgcctgccaaaatacagcggggggcaaaggattaaatgttgcaagaattgttaaactatgcggcagtgaagtgacggcaacaggtttcgcaggcgggtttaatggtgaatatctgaaagccttgctaaaacaggatcagattcaaaatgaatttgcccatatcaaaggagagaccagaagctgtattaatattttagatgatgcctatggttctacggaatatctggagccgggatgtgaggttctaaaggaggaagaggaaagctttttaaaagaggtgtttccaaaagcaatcgccaacagtgaggtggttacaatttcaggaagtattccaaaaggaattgggccagatatttatgaaaaaatgattcggattgtaaaagaacaggggaagaaggttattttggatacaagcggagaaccgctgaaacagggaataaaagcagggcctaccatgataaaacccaataaaaatgagctggaagcactttttaaaaagaaattgacaggaattgctgatttgattgcccatgcaaagaaaatctatgaaaccgggattccttatgtggttgtgtctcttggaaaggacggagctatgatggtatgcggcgatggaatttttcaggctattcctcctgaggtggaagcagttaacaccgtgggatgcggagattctatggtgggggcatttgcagttgccatggaacataagttttcatcatggaatgctcttaaatatgcagtggcagttgctgctgtaaatgcaatttctccaaaaacaggagattataatcctgatgtaagcagaaaattgttggaacgtatagaactgaaacaattatgaaagaggtgtaaatatggcattcgtcacaacaaaacaattattattagatgcacagaaaggcggttatgcaatcggagcctttaacgtagaaaatatggaaatggtacaggccgtggtagcggcggcagaagaattaaaatctccagttattatgcagacaacgccttccacagtaaaatatgcggatatggaatatttttatgtgaatgtgaaaattgcagcagaaaaagcaagtgttcccgtggctctgcatctggatcatggcagcagtttcgaattagctatgcaggctttaagagcagggtatacatcaattatgattgacggctcccatgatacattggagaaaaatattgcagtgaccagggcagttgtggaagcctgccacccttctggcattccagttgaagcagaattgggtaaggtgggaggaaaagaagatgatttggatggtggagaaggaaattcttatacagatccagaagaagcaagaaagtttgtagaagctaccggagttgactccctggcagtggccatcggaacagcccacggtatttatagaggaattccaaaactggatgtggagcgtttaagtgaaataagaaaagcagttacaattcctctggtacttcatggaacctccggtgtgcccgatgatgcagtgcgtgaatgtattcaaaggggaatgtgcaaggtaaattatgccacggatttaagaattgcattttctagaggagtaaacaaagtgctgcatgaatatccggataccattgatcctaaaaaatataacgcacaggcacgggaagaagtaaagcagtatgttatgagcagaatggaagtctgtggaagtatcggaaaggcagaataggcacatttgaagaagaaggaaaaaatccgcatattttttaatattattatttggggaggaatataacagtgaaagaatttacttatacaattgaggatgagttgggaattcacgcaagaccggcaggatcgttggttaaactggcaaaaacttgcagcagtcatatacagatcagcaaaggggataaaacagcagacgctgcccgcctgatgtcagtcatggggctggctgtaaagcagggacatacagtaagggtcaccgttgatggagaaaatcaggaagcagattatgcagcaataaaaaagttttttgaagaaaatttataggttccaaggaggacagtatggaatgttttaccggtcagtcagctttccaggggattgctgttggaagagttattgaaataaaaaaaacagataacttgattcgcaggaaacatattcagaatgtagaagaagagaaggtacgtctggataaggcgcaaaagacagctatagaacagctgaaagagctatatgaaaaggcggtcatagaagtaggagaagcaaatgcagcaatctttgaggtgcatcaaatgatgctggcggatgaagattacatggactccattgtgaacattatagaaagtcaatgtgtcaatgctgagtatgcagtcgctgccaccggagacaacttttctgagatgtttgccgcaatggatgatgcttatatgagggaacgggctgccgatatcaaagacatatccaatcggttgatccaggcgttatgttccaaggtgaatacagagaaaagatttgaggacaacacgattgttgtggccgatgatcttgcacccagtgaaacggtacagttagataaagaaaaggtgatcgcatttgttacacgccgtggttccacgaattctcatactgcaattttggcaaggacaatgaatatcccggcaattgtgaatgctgctgtgcctgcaggaattgacggcacacaggcaattgtaaacggatatacaggaacaattgttgttaatccggatgaggagactttaaaacaagcgtttcttctgaaaaaagaagagagtgagaaaagaaaattgttgacagaatacaaaggaaagccaaccgttaccaaatccgggaaggaaatcaagctgtacgccaatattggtggaacccaggatcttggtgcggtgaagcagaatgacgccggtggaattggtttatttcggagtgagtttttatatcttcaggaggacgattatcccacggaggaaaaacaatttcaggcatataggcaggctgcggaagtgatggcaggtaaaaaggtcattatccgtactttggacattggggcagataagcagattgattatttcaaattggataaagaagaaaatccagcgttagggtatcgggcggtacgaatctgcctgattcgggaggatatttttaaaacacagctacgggctttgtacagggcaagtgcttttggtaatattgcggtcatgattcctatgattatttctctttgggaagtagagaaagtaaaaaagattatgaaagaagtaagggaggaattatgtgctgacggaattcctttcaataaaaatatggaatttggaattatgatcgaaactcccgctgcggttatgatagcagaggaattggcgaaagaagtggattttttcagtatcggaaccaatgacctgacccagtatacgcttgctattgaccgccaaaatgagcagcttggcatgttttatgacgcacaccatccggctgtgttgaaaatgatacaaatggttattgaaggagcccataaagctggcatatgggcaggaatctgcggagaattaggggcagatacaacactgacggaacaatttgttcagatgggtgtggacgagctgtctgtttctccagctatgatacttcctgtaagaaaatgtatctgtgaaatggagtaaacctgaacatgagtgaccggttaactatatcaaaaaaatcctcgttaaagaccgctggccagttattacagactggaaggcggtctttttgtgaaaaatcaggatgaaaaacatctaaagaaatataaatggaaatcgttttttgggggatgttgacatgggaaaaaaggcagggtaaactgtagaagagaacaaaaaataggcggataaagactggacgctgcctgtgaggcagcagtccgggacaaaccagccatagaagagttgtacaggtggattgtgaaaggacaggaaaccatggattttaaagaaaaagaacaaatgctgttaaagcagatagaaaatgatacccgcagggatgtgtgtgtggctttttccgggggagtggacagcagtctgctccttcaggtggcctgcgtatatgccagaaaacaggggacaaaggtgtacgccctaactatggataccgtgctgcatcccgcgcaggatgtgaagattgccgcccaggtggcagagcgggccggagccattcatgtggtgctttccctgaatgagctggccgtgccggaaatggcaagcaatccaaagaaccgatgctatctgtgtaagaaggccctgttcgggaaaatgctggattttgccagagagaaaggaattgatacccttttggagggaaccaatgaggatgatcttcatgtataccgtccgggccttcaggcggtgaaggagctgggggtgaaaagtcccttggcagactgttgtctgagaaagcaggaggtgcgtcttttggcagagaagtggggcgtctgtgtggcccaccgcccctctgccccctgtctggccacccggctgccctatggagatgcgctgaatctggaactgcttaaaaggatcaacaagggtgaggaatttgtgaaaagtctgggctttgagaatgtgcggctgcgggtgcacggtcccattgtgcgcctggagctggatgccgccgctttcccacaggctgtacaggagaaggagaaaattatcaaggagctgaaaagcctgggcttttcttatattaccctggatttggagggctttcgcagcggaagcatggatctagaccagaataccccttgatcccatgaaagtggacagccagacggtgatttctgagaaaaattcattgccacagagggaaaacaatgctaaactatacctatagaacttgttgtcccaaagcataaggaatgaaattaagaattgattccgcaggacaggaaaatcaggtgcagggaatatggcagaagcattctacaaaatactggaggattgtccggtaattgcggcagtgaaaaatgaacaggggctggacaaggctcttaagacagagtgtcctatcatttttattctttttggagatgtgtgcaatgtggggcagtttgtccaaaaggggaaggatgcaggaaagaccgtgctggttcatttggatttgatcgcaggtcttggcagcaaagaggttgccgtggattttattaaaaagcatacctgtgcggacgggatcatcagcacaaagcctgggatgcttaagcgggccaaggagctggacatgcttacggtgatgcgcttttttgtactggattccatggccctggagagcattgaaaggcagtggagactggtgaagccggatgctgtggaggtccttcccggagtgatgccaaaggtcatccgccggatctgccgtcaggtgcccggccctgtcatcgccgggggattgatctccgataaggaggatatcctgaacgcattggacgcaggtgccatatccatatctaccaccaaccaggaggtatggtttttgtaaaggataacaagtttcgaaattgaatattgcagatggaagagattggagaccagacaagatgggcgctttacaggcgtctgtttcgtttggtcttttttggttggataaggatggagaaaaggaaaggagattaaaatggaaaggtatgatgcagtaattcttggggcaggggtcatcggatgtgcggctgcccgggagctgtccagatttcaggggcgcttttgtgtgttggaacgagaggaggacgtatgctgcggcacctccaaggccaacagcgccattgtccacgcaggttacgatgccgttcccggaagctggatggcgaaaatgaatgtaaagggcaaccggatgatggatgaaatttccagagaactggatgttcccttcaggcgcattggttcattggtggtatgctttcaggaagaggagaaggcaattttggaggagctctatgagagaggatgcaggaaccaggtggaaggcctcgctcttttggacggggagcaggccagggccttggagccgggattgtcccaggaggtagaaggggccttgtacgcacccacggccggcattgtctgtccctttgaacttaccctggcctttggagaaaatgcagtggaaaatggggtggaattcttctttgattcccatgtggatcatgtggaaggtacacaggaggggtatctgatcacagtgggagacaggaagatttatgccagggcagtgatcaatgcagctggtgtctacgcagatgtattccacaacatggtcagcgcccacaagcttcagatcattccaagaagaggggaatactgtcttttggacaaggaggcggggaatcttattagccacaccattttccaggtgccgggaccctacggaaaaggtgtcctggtcacgccaacggtacatggaaacctgttggtgggtccaaatgcccaggatcttcaagaaaaagaagaggtgtgtaccacccaggagggcttagaggaggtgctgttaaaaggctcccgttccttgaaagcactgcccaaagggatgatcattacttcctttgcaggtcttcgggcccatgaagtgggagaggattttgttctgggccagccaaaggatgcaccgggatttttcgatggagcagggatcgcctccccaggcctgtccagcgctccggcaattgggagatatctggcagaggagacagcctcctacttaaatatagaagaaaagaaggactttcatcccataagaaaggccatggtccatacccaggagttaaaccctgaccagtggcagagacttatagagagaaatcctgcctatggaaatatgatctgccgctgtgagaaggtgacagaaggggagatcgtggatgcagtgaggagtcctttgggggcgaagtctctggatggagtaaaacgccgtactcgttccggaatggggcggtgccagggaggcttttgttcgccaagagttatggagatactcagcacagagctgggggtggattggacgaagatcactaaggccgggggaaattccaggcttttaataggaagaacaggggaggttgttggggatgaattatgatttggccatcattggaggaggtcccgccggtctggctgcggcggtggcggcaaaagagcagggaattgacagcctgatcattttagagagggaggccatgctgggaggtattttaaaccagtgtattcacaatggattcggccttcacacctttggggaggagttaacagggccagaatacgcccatcgatttgtggagaagacacaggagctggaaattccctatctgctggagaccatggtgctggatatcaccccggaaaaggaaatcacggcagtaaaccgtacagaaggcattctgaggattcaggccaaggcggtgatcctggccatgggctgcagggagaggccaaggggggcattaaatatcccgggctatcgtccggcgggaatatattccgcaggcactgcccagcgtcttgtaaatatggaagggtaccttcctgggaaagaagtggtcatcttaggctctggggacattggactcattatggcaaggagaatgaccctggaaggagccaaggtgaaggctgtggcagaagtgatgccctattctgggggactgaagcgaaatattgtccagtgtctggacgattatgggattcccttgctgttaagccatacagtggtggacattcacggaaaggaacgtctggagggggtcaccctggcccaggtggatgaaaagagaaaacccattcccggaacccggcagtttctgtcttgtgataccctgttgctttccgtgggcctgctcccggaaaatgaactgtccaaggaggcaggggtgaagctgaacccagtcacctctggtccggtggtgggagagaaccttcagacctgtgtggagggaattttcgcctgcggaaatgtgctccatgtccatgacctggtggactatgtaagtcaggaggcggccatggcaggtaagaatgcggccaggtatatcaaaatgggaaatattccaggaagacagatccctcttaccccaggcagtggtgtgcgctacaccgttcctgccaatgtgtgtccggaaaatatggaggagtccctcattgtgcgcttccgtgtggacaatgtgtaccagggccgttgtgtgtgtgtccgttttgacggccggctgatgtccaggaaaaagaaaaaaatcatggctccgggagaaatgcagtccgtggttttgaaaaaacaggagctggagcagtttcaggaattaaaggaagttactatatcaatagaggaggctcagaaatgacaaaaagacagttgacctgtatcggatgtcccttaggctgtgccctgacagccgttcttcaggatggggttgtggtatctgtagagggaaatacctgccgccagggggaaatctatgctcacaaggagtgcaccaaccccaccaggatcgtcaccagcaccattcgtgtcacaggaggagagtctccggtggtatcggtaaagaccagccaggatattcccaaaaacaaaattttcgaatgtgtggaggccatcaagaagtgcagggccaaggccccagtttccgtgggccaggtgctcatttcccacgtggcaggaacccaggcagacgtggtggccaccagagaaatcttggtcgtgacagaggatattacaagcaggtgacaagttgctgctgccagattggccagaggtaatgacactatattccgaacatatccgcgtgagtgccggtacggtacaataaaagctcattttcttcctggcgataaattaacagccagtcaggctctatatggcattcacgatatccggaaaagctgccacttagattgtggtctttattctttagagggagaggggcgggaatgcgtagtgtgtcaatagcctgttgcagtaagtgcattttgtacccgcgttttacacaggctttgaaatcttttttgaatttggtggagtatcgtacatcaagcatatttagccctccatcaattcagtaaacaaatcatcagtgctgccactgaatttatgccccccgttgttttcaagttcctgtattgcctctaatgtttcagcgtttggcgtttcttccggaacggctgctccctgtagataagcgatgatatataataatttgccctctgggatttgatctataaggtttttggcaatatctctattactcataaaaacacttcctttcatgcttattatatgctgttaaaatgttgctaatccccaggcgtttcagccgggataaactggacaaccatatcataattaacagctgaaaggagtttttccatatcgtcaaaactgaaattctgtttatttatgattttggttaatgcttgcggggtaatgtttaatttttgagctacttcacgctgactgatctgcttatcaagcaacagttttttgaattcaataatcaattgttcttttgatgcatagagcatatgaacccctcccttcgttctaatttgaattaagtataatacaaaatgggttatatatcaactgtaaaagaatagaaaaaacccaaaaaaggaaagaaataatagaaaattttgactgtttagaacacaagacaaaagcagacaaacaaaactttgtcaagaaaaaatacttgacaccagaaaagaaataggttatgatacccaaggtgataacagatggagaagattgttgaacagacacttttgtatgatttttacggagagctgctgacagagaagcagcggcaggtttatgaaagcgtggtcatggatgattattccttgagcgaggttgcccaggatctggggatcagccgacagggggtacatgatatgatcaggcggtgcaataagaccctggaggaatatgaagacaagcttcatctggtggagaaatttctttatattaaggagcgggttcatgagatccatgtccttacaaagaaatacaacgcctcagacattgaggcaatttccaatgaaattctggaggaattataatagatggcatttgaaagtttgactgataaactgcagaatgtgtttaagaagcttcgcagcaagggacgcctcaccgaagaagatgtgaaggtggccttaaaggaagtgaaaatggcacttctggaagcagacgtgaattttaaggttgtgaagcagtttacaaaagcggtccaggaacgggcggtgggggcagatgtgatgaatggcctcaacccgggacagatggtgatcaagattgtaaacgaagagctggtcaagctcatgggcagtgagaccactgagcttcccatcaagccgggaaatgacatgactgttcttatgatggctggccttcagggcgctggtaagaccacgactgtggccaagctggcgggaaaactgaagtcaaagggcaaaaagcctcttttagtggcctgcgatgtgtatcgtcccgcagccatcacccagcttcaggtgaacggagagaagcagggggttgaggtgttctccatgggtgataagcagaagcctgtggacattgcaaaggcagccctggagcatgccaagaacaaccagcagaatgtagtccttattgataccgcaggccgtcttcatattgatgaagagatgatgcaggagcttgcggatattaaagccaatattcaggtggatgccaccattctggtggtggatgccatgaccggtcaggatgcagtgaatgtggcccagacctttactgagaaggtgggtattgacggagtcatcctcaccaagctggacggagatacccgtggcggagccgccctttccattaaggcagtcactggcaagcccctgttatatgtgggtatgggagagaagctttcggatctggagcagttttatccggagcgtatggcttccagaatccttggcatgggggatgtgatgagcctgatcgagaaggcagagcaggccattgacaaggaaaaggccgaggccatgggcaagaagctgaaaaagatggactttgacttcaatgactatctggacagcatggagcagatgaagaagatgggcggcttttccagtatcctgagcatgatcccaggactgggagggggcaagctgaagaacattgaggatatgatcgatgagagcgccatggagcgcagccgttccattatcctctccatgactcctcaggagcgggccaacccgggaattttgaatccctcccggaagaaccggatcgccagaggaagcggcgtggacatcagcgaggtgaaccgccttgtgaagcagtttgaacagtccaagaagatgatgaagcagatgcccggacttacagggaagggctccaagcgtggaggcttcaagcttcccttctagagagacaattacagggagaatgacctggcgggcttaaaagaaagaatgatgaagcgctggaagcccagctgctttttatcagataaattagaaaaccaaaagatactaaattttattttatggaggaatgaacaatggcagtaaagatcagattaagaagaatgggacagaagaaagcacctttttatagaatcgtagttgcagattcccgtaccaagagagacggaaaatgcatcgaagagatcggaacctatgatcccaatgtagagccaagcgcaatcaaggtgaacgaagaggcagctaagaaatggcttgcagccggcgcacagcccacagagacagttggaaaaatcttaaaagcagccggaattgagaaataataggataccaaagaggtatttctatggcgtgtttctccttatgggagagggaaaagtcagggaggtatgtaatgaaagagcttgtggaagtaattgcaaaatctcttgttgaaaatccggatgaagtcgtggttaccgaaaccgagaaagaggatgaggtagtcattgaactaaaagtgggcgcctcggatatggggaaagtaattggaagacagggacgcattgccaaggcgatccgaactgttgtgaaagccgcttcatcaaagagcagcaaaaaagtggttgtagatattctgcaatgaaaaataatcaggagctgttgccctttgggcagccggctccttcttttaacgataaaaccggcgagacaaaaggagtatggttatggaagagttattgaaagtgggtgtgatcaccaccacacacggtgtgcggggggaggttaaggtctatcctaccacagaggatgcccgccgttttctggatttggaatatgtactgctggacacaggaaaagaaatgcggcagctcaccatagaaaatgtaaagttttttaaaaaccaggcaatcttaaaattcaaagacatggataatattaacgacattgagaaatacaagggcagggatttgtggatccccagggaggaaggaattcctctaaaggagaatgaatattatattgcggatctgcttggcatggaggttcttctggaagacggaagcagcttcggcaccttaaaggatgtaatggagacaggagccaacgatgtgtatgtggtggccacgaaggaaggccaagaggttctgctgcctgccatcagagactgtatcctggatgtggatattgaaaataagaaaatgaccgtgcatcttatgaacggattagtatagcaggaatggtgaaaatgaattatcacgtgttgaccttattccctgagatgattgagcagggattaaatacaagcattatcggcagagccatggcaaagggaattcttaccctggaggctgtgaatatccgggactttgcctttaataagcatcaaaaggtagatgattatccctatggagggggagccggcatggtgatgcaggcagagccggtgtatctggcctatgaatccgttgtacagaaaatcggcagaaggccaagggtggtctacctcaccccccaggggcaggtatttcatcagcagatggcccgggagctggcggcagaggaagatctggtatttctgtgcggccactatgaaggcattgacgagcgggtgctggaggagatcgtcacagactatgtgtcgatcggtgattacgtgctcaccggaggggagctgcccgccatggtcctcattgacgctgtctcccggatggttccaggagtgctcagcaatgaagaatccggggagaccgaatcctttgcgggaaatcttttggagtatccacagtacagccgtccggagatctggcatgacaggcaggttccccaggtccttctgtcaggccaccatgccaatgtggagaaatggcgcagagagcagtctatcctgcgcacggccaaggtacgccccgaccttttaaaaaaggcccagctcacaggaaaagaatggaattggctgcggggacaaagggaaaagcaagactgaccagggtatcccaggagaaaagaaagaggtcttttatcggacagatccactgcacaggtgagcatctgtccgttttcttttctagaaactctggctccaggttaagaaaaagaatcggtatggtatgattgatgcagataaatatgtacagactccataaaatctccatattggtatgataaaatatcccccaggaggatagaaaaatgaaacggattcttgtagtggaagatgaagaggatatccagcttatgctgaaaaattacctgcagtgggaaggttatgaagtcaccgctgcaggggatggaatggaaggaatgaagaaattccaggagggggcctatgacttgatccttctggatttgatgctgcctagaatggatggatttagcttatgtagaatgatccggcaggagtcagagattcccattatcatgctcactgccctggacagcgaagaaagccagatcaaggggttggacctcttggctgacgattatgtgacaaaacctttttccatgcctgtactgttgcggaaaataggcgctgtgctcaggagagcttacaaagaaagagaagagcagaccgtcacctatcagaatctcaccatggatctggagggctatcatgtatatgtaaattcccaggaggtggagctcacccagagagaatttgaactgttgaaggtcctgctgataaataaagggagagtgctcacaaggcagatgctcctggaccaggtgtggggcatggattattttggagacgagcggattgtggatacccatgtaaaaaatcttagaaaaaagctttctgtggattatgtggagaccattagaggggtgggataccggattgataaagaggataaaaggaagtctgaccattaaaatgtttttggtcatctgcggtctgctggtggccatcagtgcgctcacctatggcgccatcgcctattttatgccggtgacctataaaaatgagctcacggagcagctagaggaacaggcagagagcctggtgcgggagcttgagtcaaaagagactctcaaagagggagaagatctgatcaaagactttgaaaaaaacgcccaggtggacatggagatttatgatgattatggagaactggtgtatcccacctatgacagtgacggcaaagctgtggtaaaatcccagccggaggcccaggcagcccagaaatcagcagttgcttctgtggacagggctgacactgtggtggaggaacagcgggacacagccgttgactccgaggagcctgaagaactggaatggggatttgatcatgcgtttattgaggcgcagcaggagacggcagcaggagaagccatggaatcaatgagctttcccatggatgttcaggagatggatgaactgtattccgattatttaagtaatgggggagtggaaagctttaccgtggaattggatgaagaccatgtgtatgaaatcatcatcgaaaaaccgctcacagaggtgaatcaggccctggggattttaaaaaaggtaatcccctatatcattgggattgtttttgcggcagccctgctgggggcagccttcgtgtcctggtacctggtgcgccccatagtgcgtatgagcaccgttgcacagaaaatggcccagatggattttcaggaaacctgtgttcagaccagagaggatgagatcggccggctgggacacagtctgaaccgattgtctctgaatttatcccaggccctggaaagacttcagagggccaatgcacagcttaaatcggacattgagaaggagcgggagcaggagaaaagaaggatggccttcttttctgctgtttcccatgagctgaagactccggtgacgattttaaaaggacatcttcagggaatgctccagaaggtgggggaatatcaaaacagagaatactatctgaaaagatctctggatgtgacagaaaatatggaatccatggtacaggagatcctcacggtttccagaatggaggcggccggattttccatccagctgcaggagctggatctgtctgagcggatccgtctggttctggccgaactcacggagcttatggaaaacaagaatctgaggctgtccgtatggattccggagcactgtatgtgtatggcagatgaaagtatgatgacaaaggtcatcagcaatctgctcaccaatgccatccggtattctccttgtggggcacagatccgggttttccttcgcagggaagaggagcggattctgtgcggggtggaaaataccggggtacagcttccgaaggaggctctgcccaagctgttccaggctttttaccgggtggaggagtccagaaaccggaaaacagggggcagcggacttggcctgtacattgtccggatgatcgttgaacttcatgcaggaggctgtctggcagagaatattcccgacggcgtgcggatttcctttgccatgcctgtaaactccatacaaactccataaaaactccaaacagtttccatacagtcctggtagtctatgactatagaaaatcaaaaggagatggaagctatgaagaaaaaagtgatcattacaatgctgctgacaatgggagttttaagtctgggggttatggaggccagcgcctatacggtttcaggtccctcctatacctttgtgagaggagaaggtgagggggaacgcagctgggataataaggaaaatcagaattactatcgccagaaaaccaaggaaagccttgcctatctggaaaaatacggggtaacctatgatgtgaagaagggtgcgatctactatgaaggaaaactggtgaactggattctggatgagtactgcggggatgaatggatgacctcttcagacctagacggggagattggcctttttgtggagcgcaatgatgaatatgaagtcactggcgtacgggtggctgacaaagaggaatatgaggagtatagctgggactatggtgatattgcgtacagagatttacaggaggacgtggccttttccgtggtggaggctgctgcccaggaggtggcggacgccatagaagaggatggctgggacgctgaagaatatgcgatttcaggcagaaggagcactgctgtctatgagggaaactataatgaggaaacctctgacaaagtaaaagaatataaaaaggcagggatcaccacggataaaactggttcctggatatggaagggccagaaggtccgcatgcttattgatgatgacggaagcttttacagcaacggcgaggctggcgccaaggatgagaatatatatttaatggtaaacagagatacctatggggacatttccaaggtggaagaacttacatcaaaggagctgctggcctttttggcacagcgggacagcaagaactactaaatagccggagggaatattggtcctaaaaggctgatccagaggatcaggcggtaaattcataaagaaattttggaaaaatgtcagtggactgctgacatttttctttttgctgttaaattaagaaaggcggccaagggagaggaacctttgggagcctggcgctggaatataggatgaaccatgaagctggcgctttaaaaagcaatggcagacttaaaaagttgaggagttcttggaattttgatatattatagaaagattattatatacgcagaaaggacccaggggtatacttgggaaaaaagattggattcaggaggagaaaatgagagaaagcggcattctgcttccagtattcagcctgccgtcaccgggcggcattggttgtttttctaaggaagcttttgattttgtggattttttagtgagggcaggacaaaaatattggcagatccttccgctgggccctaccagctacggagattcgccttaccagtctttttctacctacggggggaatccctatttcattgatctggagaccttgaaaaaagaaggacttctcactgcccgggagatcagggcctgtgatttcggagggaaccccaggagcattgactatgagaagctctatgaaaaccgtctgaaacttctgagaaaagcctatgagagggcgagggtgggagagaatcaggaattcttaaagttccgggagaccaaccgctggtggctgcgggactatgcggtctttatgatcgtaaaggatattttcgggggcgcaccctggcaggagtgggcccaggacatccggtaccggtgggacaatgccatggagtactaccagcgggagtattattttgacattgagttttatgaatacctacaatatcttttcactcagcagtggcagaagctgaaaaaatatgccaatgaccggggagtaaagatcgtgggagatatacccatctacgtggcttatgacagtgcggatgtgtgggccaatcctcagctgtttcagttggatgagcagagaaaacccttggcggttgcaggctgtccccctgacggtttttcggcagacggccagctctggggaaatcccctgtatgactgggacagacaccgccatacgggatatgactggtgggtgggtcgtgtggcctactgctatgagctctttgacgtggtgcgcattgaccatttcagaggctttgacgagtatttttccattccctatggggatgagacagccaggggcggccattgggagaaaggacctggcattgagctgtttcgtgctattcggagccgtcttgggaataaggagatcattgcggaggatctggggtatatgacagattctgtgaaggccttggtggaggagagcggatatccggggatgaaggtcctggagtttgccttcgattccagagattccagcaacagtagcgattatctgccccacaattatcagagaaactgtgtggcctacacaggaacccatgacaacgagaccttgaggggctggctggacagcattaccagagaagagatgaagagggtgagagagtatctgtatgccccaaaagcctccaaggaggagctggtggaggagctggtgcgcctggtggtgtccagcacagcagatctgtgcgtgattcccatacaggactatctggttctgggaaatgaagccaggatcaatcatccctccacaattggggagaattggaaatggagattggaaaaaggggatcttaacaaggctttagaaaaaaagatccgcaggctggcggagatatacggaaggattcctgctgtgtgacagggactggaaaggagtctgaatttatttggatctgcgggggacaatgggtctaatagaaagcatgttttttatattgccggaatggccggcagggttttgggagatcatacaaggagaatactggacttcctgaaaatttgtggtatgattatccataaatagaatggaaagaaggagatgcttatgagtgtattttggggattgatgattccttttctgggcaccaccctgggtgctgcctgtgtattttttgtgcgaaaagagctgaaaccgcttcttcagaagagtctgctgggatttgcttcaggagttatggtggccgcttctgtgtggtctcttctgattccggcaatggatatgtcggatcaaatgggaaaatttgcctttgtgcctgcggcagtgggtctgttgctgggaattggatttttattgctgatggatcatattatcccacatcttcatattggaagtgtggaaggtgagggtccaaagtgttcattaaagaaaaccaccatgctggtgttggccgtgactcttcacaatattccggaagggatggcggtgggtgtggtgctggcaggaatgctgtctgcaaattcagacattaccctggcaggagcctttgccctgtccattggaatcgccatccagaattttcccgagggagccattatcagtcttcctctgaaaagcgaggacggaatgtccagaggtaaggcctttgtgtacggaaccctgtcagggatcgttgagccggtctttggcggcctcacggttcttctggcaagattcgtcacacccattcttccctatctgctggcttttgccgcaggggccatgatctatgtggtggtggaggagctcatccccgaggcgtcagagggggaacacagcaatatcgggaccataggttttgctatggggtttgtacttatgatgatcctggatgtggctttgggatagagtgtgagaatgtggggcgttacttggcgcaaactgccgcaggacgaaatgtatgggggagctttatgaagttagaagggcagtctatggatacaatacgagttgcaatttgcgacgatgaaaagaatgcactgaaaattattgaacgtgaggttaaaaagaattttcaaaagcaggatcaaaagattgaagtggatatcttttctgttccggatgaaatgacgatggcatatgatgtctattttttagatattgatatgccgcaaataaatggaatagattttgctgagcaaatttatcgtgaacacagagatgctttcttggtttttgtttctgcaagagaagagtatgtgtttcaaagttttcgtgttcatcctttttctttcgtgcgtaaatcgcggttttcttctgatttagagaaaactataggtgatctgtgtattgcatttagggaaaaacataaggatgatataattaaaattgaagatgagttggggcatgtatactatgggaagcaaaatgaaattttatatcttgaagcaaaagataaatatgtaagtgtggtgacggaaacaggcgaaaaacttatacgaagttctttgaaggagcaggaggccgctttgagaccgttagggtttgttcggagtcataagtcgtttcttgtaaatgtgaaaaaaatatatgcggttcgatatgataaaattattctgaccaaccaaaaggagctccctctgaagcgggggaaagttgcagaagtgaagaatttaatatgtaactatttgtaaaagaatcgcttttgtggttatatcattaattataatcctggaggagatattatggggggagaatttgttgatatacggcaaatgtcaattctttatcagtttccagaaaatcgggtgataggtgttgttggttatttgttggacagtttgctgtgtatgtattttgtacataatttttttagagctcgaaaacagaaatttgatgtattatggatagcagccgggataggctcggctatattcttatatattcaaaacacattgattggaaacagcttttttccgtgggtagcagcatctgtatcgctgccatttttgtatgctgtattgttctatcaaggagaatggcaaataaaactttgcagctgctgtcttttttttacacttttgtactcggttgaggggttcgctgtgattttgatccgtattctcgcgctaaagtgccatttactgcgctgggaatatgcaattctattcggattccgtagaattgtaatgaaactattattgtttctttgtcttaaatttttactgcgctatacggtaaagaatggcaacaaaatttccttaaagtattggtactgtgtatggacgatctcaataatagaattttgggttatgtacagtacaataaaagaatctgaggtggaaattaatgtgatgagacataaccttatcatttttatcttttgcactataattcccattctcttttattatgttgccgttctgattgaagaaaatgttgatcaatctagaataaatatggctcagcatcagtttattgatacgcagaaacaatatatagggcagattttggaaatggaggattctctgcgcaagtttcggcatgattatcgggcacatttattttgtctggatcatctggtagaagaacaaaattatacagagctgcatggttatttgcataatctgcatgaaattgatatggggcagagttgtttgatctcttatacgggaaatagaaatatagatatcattctaaatcagaaaaaaacattggcgcaagataagcaagtagcttttgagataaaagaatgtaatatagagattaagtacctgtctttctatgatttgaatcttttgttgtctaatctctgtgacaatgccatagaagcggcacagaaagtagaaaaagggtatgtttggctgagtttggaaaaaactatggcatacttgaagatagaaattaaaaacagtactcatgaaaatgtgttgattaaaaatccgaaattccggactggaaagtctgaaaaagaattacatggactggggatgaaaattatttctaatgtgatagagaaatatgacggtactatgacattggaaggtggagaggattggcttgcgataaaaatcatattgttggacttggccagggaggatgataaaaaaaatagaagaagagagtaggcggactgaagatagcgacaaaaattgcaggatagcgacaaacgaattgtaggataagataacagatgctatcattgattttgaaaaaaggtatgaatcatatctaaaaaatctgtaagtttaaaaatcaaaatcaggagggtatcgttatgaaaaaaagaaaattcatatgttcaactgcagttgccatggcaattattgtggctgggtctgccatgtctgctattccacagagctatgtctatgcgggagctttagaagaaggagttgtatttccagacgtgtacacagtggatctggtccagccggaaaaggatgatgcagttgtaaatgaaaaggtaaatgctttaataaaaagtatgacattggaagaaaaattttcattccttgggggcagcggaatgggtactcatggagaggccggaaatcttccaggcgttgggagactgggagtgcctgccataaatatgcatgatggtccggcaggtatttactatctgacagatactacaaatccccctcaagaaattctactggctgctacatgggatgaggaaatggccgaaaaatatggggaaatggtaagtaaggagagtaaagctctgggttgtggaatgatgctgagcgcacaggtggatatacagagaaatcctcaatttcgccgtacgaaagatcagatgggagaggatccatatcttctttctagtctggcggatgacttggtcacaggaatgcagagtgagggaggaattgcagtcctgaagcatttcgctgggtatacagaagacaaaaacaatgaagtgatttctgaacaggcacttcatgaagtatatctgcctggatttgagaccgctattaaaaatgcggatgcacttggagttatgtcatcctataatttggtaaacggtgaatatgcatccgctaatacgtatctgcaaaatgaagtactgcgggatatgtggggatatcaatattttaccattactgactggggcggaaatcatgagtttactttaaataaaggaacagacattgagatgcctacgctttacggaaacggtatcgacagattgcagaatagaatttcagatgaaacggtagaagaagaatctggcggatttggatgggtaccggaggaaaaactagaaacttttacgcaggaggaagcggatgccatggttgatacggcagtaggccgtatcctgagagcttatggaaaggctggttatctgaccttggtagaggtagatgaggatggctgtgcaaaggaagaagctggacgtacagagccaatcagacagtttaccaaagaaacagcagtagagcagttggcagaagtttatgattccagtaatgcagccgtgcaggagattgcggaggaaggagctgtattactgaaaaatgaagatggagatgcagatgggagcaagatgcttcctctgaaatcagaagattcggtggcagtgatcggtctgacggggatgcatttggcctccggtgtgggcggtgaacgctcctatggtaatgtttcagcaatgaccagcccttatcaggcactttgcgacacacttggagaagaaaaagtatctggtgaagtttatagtgatattattggaaatacaattcccaatgagaatctgtttacttcggcggatggcgatgaacatggggtaacaagaacttatggtgtatcaggggcagagggtgcagcccttgccatggagggaaattctctgtttgcctctgatatttcggatactgccatggaaggtcatgatattggtgaaatttgtcaggttgacgatgtgattgattttaccacaggcacaataaatggtgagcctaatacaacgtataaaattgccaatgcagatgcaggaacagcagcagcttttgatgtggcaacagctccggcatatacgtggaatggatatatcgaagcaccggaagatggagactatacaatttctcttcatagtattggcggaacatcaaaagtagtgatctacgatacggatggaacaacggagttggcaaatttaaatggttccggtgctactcggcagggtgcccagtggtatgacagtattgtatccaccgagacagggatgaatgttaaaacagttgatgtgagcctgaaagctggagagaggtactatttcttcgttcagggctgcacatctgtagaagacaaagatctgcagatgaacctgtcctggatcacaccaagtcaaaagcaggcaaataaggataaggcgattgaagcagctaagaacaatcagaaagttattgtatttgcgtatgcgccagccagtgcatcttctgctgctccttcaaaagaggcaatgacattaaagatgcccaaagagcaggaggacatgatcaatacaattgcgcaggcggcgcatgaagctggaaacgaagtttgtgtggtattaaatcactcaaatcaggtggtagcagaagattggattgatcaggtggatggaattttagatatgttttacgcaggccagcgcagcggtgttgccatggcaaatcttttgactggtgctgtgaatcctagtggaaagttaccttatactgtgccgaaaacagatgcagatacactgatcacatattcggatgaagcatgggcgatgtatcaggccgaaggggataccaccactggcataaaaactacaatttacagcgaaggtattaatacaggatataagtggtttgataaaatggatattgaaccccagtatgattttggttacggactgtcttatactacttttgcgtatgatgatctgaaagtgacagaagcaccggccgaaaatgaaacagtagggtacgatgtaaccttctctgtgacaaatacaggagatatggccggaagcgaagtggcacaggtttatttgggtgaggcacaggttccggagggaatccaaacttccaaatatgcattggcaggttatcaaaaggtgaaggatattcagcctggtgaaactcgtgaagttacgattcatatatctgaacgttcactgtcttattggaacagcaatcaggaagaattaaatgaaagagcagatgggacgaaggataagtggacagttgctgaaggaatgagaacactgtatgtaggtgacgcatctgataatttgatcttgcaggaggatattaatgtagggtaaattttcagtatgataaaataaatagcggtaattgaaccaaagacagctggagaaatctggctgtctttttaaactatgcgtattcgaaaccaagtaaacagtaatcagcagtaaagcatgactttattctattattttaagttatagacaatttcattctttcattttataatgagagataggctgaataatagtattgccaaataaaattcaaaagtgtgatcgagaaggggattttatgaaaaatagattaggccaaatggtgaacataattctgacggtgctgatggttttggggctgctgcctgggaccgcactgttctgctctgctgcagaagaacagaaggtaatgcgcgtggcgtttcctgacgcagagggatataccatgaagacagaggacggagaacactatggactggtggtggatgtcctggacgaggttgccaaatataccggctggaaatatgaatatattgatgtcgggaatgataatgtgctggaagattttatggcaggggaatttgacttgatgggtggtcaatattatatggatggactggaggaatattacggttatccagattacaactgcggatacagtaagatcgttctattggcacgaaaagatgacggcagcattaagggttatgatctgcgtaccttcaacggcaaaaccatcggagtctttgagcgggcacaagaaaatatccgccgtcttcaggtttatctggatctgaatgacattgactgtactctaaagtattataattatgatcagcttatggaaactggaagtctcaatcattttttggacaagggagaggtagatctggtgctgggcagcagcttctctgtaggagaggactattatattgcagcagcctttgattcccagccccattacattgtcaccagcccagataatcaggaggtgctggacggactgaatatggccatggagaaaatctatgaggcagatcccaattttgcccaaaagctgtacgaggataattttccagccgcatcgatacttaatcctgtgcttaccacccaggaaagggactatgtgactaaatcgggaaacgtgacagttgctgtgccccgggactggcatcctctgctgtgtctgaacaacggcgaacagcatgacggtctgatcccggatatcttaaaggagatatcagactattccggcctgaagtttacctatctttattgtgatacttatattcaggctattgaaaagcttcagcagggggaggcagatgttctgggcttttatttaggtacggaacaggatgccattgaacagaggattgctctgaccaccccctacggagaattaaattccattctggtgcgcaataaaaaatccagctatcccgcagaggggcttaccggcgccgtcctggatggccaggaattgccagaggatatcattgtggacaaggtagtgaagtattcagatatgactacggctttgtctgacgtaaatcgtggaaaggtggactttttctacggtgtttcttcccgtcttgaaaatatcatccagaataataactttacaaatctgcttcaggtgaatctggtgaacgataaccttggaatcagttttgcattgaaaagccctgtacagcctgagcttttttccattctcaacaagtccttgaatggtatatctgcggaggagaaagctgccatcagcagtaagaatgtggtttccatcggggagccccatatgactctcaccagcattgtgtatgccaatcctgctttggcagtgaccgtagtggctacgggactgatcctgcttttgatcgtggtcatcttgttcagctggttccgcctccatgcggctgctatgaaggcagagctgaacaaagcagaggcagacaacaaggcaaaaagcgaatttctgtcccggatgagtcatgagatccgtacacccatgaatgccatcgtggggctgactgatattatggaaatgacggaagggcttccggacacgtccagagaaaaattgaaaaaaataaagtcttcttcccagtacctgctcagcctgatcaacgacattctggatatgagccgcattgaaaatggaaaaatgaccattgtccaggaggcattttctctggaggggattctggaggagattgaaagtatgctggccccggaggcggtaaacaaaagcctgaattttcatatggataaggagattcaagacgatgtggtcataggcgatgccatccgcctgcagcaggtattgctgaacttgctgtccaatgcctttaaattcacgcctgcgggggggacggtgtctctttgtgcaagagaggattcctctgaggaggacaatgtagttcttactttctgcgtaaaggatacaggcatcggcattgccagggaggaacagcagcgcatttttaaaagctttgaacagctggggtccaactactccaaaagtcaggggaccggcttggggctggctatcagcaggagcattgtgcagctgatgggaggccggctggaattgaagagtgagttgggaaagggaagtgaattctactttaccattacctgccccaagggagagatggaaaagccagctcctcttgtgccggaatatgaaaaagaactgctggaagggctgaagattctgctggcagaggacaatttcttgaatgcggaaattgcaatggaactgttccgcacccagggagccaaggtgagctgggcccaaaacggccgggaggctgtggagatgttcaaaaacagcagaccgggaacgtgggatgtgatcttgatggatattcagatgccggagatgaacggactggaagccacattggctgtccgggccctggaacggccggatgcccggaccattcccattcttgccatgacagccaatgcatttaaagaagacgagaaggcggctctggaagccggaatgaatggatttattcccaaacccattgatatcaacgtgttgtatcaggagttatattatgctcttaagaggtcgccccagaaaagcagtatgaacaaaggttagatcggaaattcatagggcagtgcctctgttggggataaagaagcggctcatatccaccttttccagggtgagaagctggatctttttctgaattcctcccgcatatcccgtcagactgccgttggtgcccactactctatggcagggtacgataatggaaatggggttatgtcccacggcaccgcccaccgcctgggcggacatggtttccattcctttttcacgggctatctgggcggcaagctctgcataggttatggtgtgtccgtatggaatctgaagaagcagcttccatacagatacacggaagggactgccaaggaggcacaaagccggggtaaaatccggaatatctccctgaaaataaaggtcaagccaagctttggcctggtcaaatatgggcagctctttttcctctgccttcccggagagggaggcggcaaagtatttctggccctccagccatagtcctgtaagggcatttccattactggccatagtcagaacgcctgctggggatgtatagtggttcatatactgcatgtgaaactcctttccgtaaaaaataaggatacagcaggactattcccgctgtatcagttgacttaaaaattcttcctctggtataggatagccgtataaataaccctgggcataggggcagtccatggcttttagcagggaggcctgtccctgagtttccacaccctctgccaccacggtcagattcagttctctggccagatcaattacaagtttcattactttttgtcttcgtttatggttttctgcctgtcttaagaatttctgatccagcttcagcacatcaatgggaagctcgctgagggtgttcagtgaggaataaccgcttccaaaatcatccatctcaataataaatccacattcttttaagtgcttgatcaccaccagcagcatggcgtcttttacataggctgactctgtgatctctaaatgaagggaggccggttccaggtcatattttttcaggagtgccaaaagctgccggggcaggtcctcatgataaaggtctgtgccggaaacatttacggataccgggattgtgcggatgccctcctttttccaagtctggaggatctggcaggctttttcccatacatacagatccaaggaatagataaagctgttccgctcaaataccgggatgaaatcagcgggcataagaaggcccagttttggatgcttccaccgcaccagtgcttctgcgccgataattttttctgtggctacctctgcctttggctggagatagatgagaaactcctcctgccgtaaagcttcttccatagtattggtgatcttttgctcccgtttgaatttttcgtgcatggaattatcataaaaggcgaatctttggctgaaaattcctttaatactgttcatggccagaagcgcccggtcacacatgatggaaagtgacagcccccgggattccatatggtaaacgccaaccttcacttgaatacgcatggaaagcggataattatccagaaagcagctgaggttcttgttcaattggctgtacacggcctggcttcggggcaggaggataaagaaggtatctgctctggccctggtgagcagcgtgttctcatttgtctggatacctaaaagacacactgctaaatccgccagaagccggtctcctctttcccttccgaaagtatcattgatgaatttaaactgttcaatatccactgccagcacatcaaattccaaatccggatttttcttcactacagcggcagctttgtcataaaaggctttctctgtgtacagtccggtgagaaggtcacgttccagggattctatggtacatttggccttctgtgcctctgtgagcaggttttgcagacgcaggttggtcttggcaagtgaacgctgataattaatgagccggctgttgagcttttgaatctcataatagccgggaccgtagaggtcctgtgcagcaagtccgggagtatgaagtaccatgagcgccatttctatgagtttgggaagctggtccggttccaccgggctgtaaaccataataagtttctggttattgaaaggcatggcggtggcaaaaacctccggactttcttctgctttcattttgaggcggacagaggagccaaaatctgtatccagcttgaaaagaggcgctaaggcttctgggttttgaaatagcatccggatatcatcaccttcatgaaccgtcagaccgatggatatattttgcagaacacgttttacagaaccgttttcatcgcacaaagcaatatatactatcatatgttttcgtccgcccattttaccagagcacgggcatcctgcttacagacaatagggccccagctcttccatatttgtgtttcttcaaatgcgtggccgcccacagcgatcttcagcttcggccagttatccaaaagggaacggaccgcttctttgcacaggggaaggtggtggggcattgtcactgacagagttactaaatcgggatgaaactgggaaaccgcagatttcatggattcaacaggtacggccgctcccagataaatactgtcccagccattgtattcaaacaaatcagccaccatgcgggcacccatttcgtggagctcgctgcccacacaggctactaccacgttttttcccttccggggctgtgaaaagatcaagggatagaactgagagagggccatctgggtcacagaggtacaatagtgctccatgtcaatagagagctgatggcggtgccacagttctcccacccggtacatggtgtgtgacacaatatccgtacacacatcctccagagggatccctgcttttatgtattgggccatgaggcttatggcctctttcgtgttggattccagcagattcttcaggtatctctggatttccccttcatattttacgggttttggctctgtctgggtgctttggcggcattcccgggcggtagcctcgatggccaggtccagaatccggtggagtcgtggctgcatctgtgaggggaggaccttttttgcacaggaccgtataaaattatagtggtcggtcatgttcagacagagctcctcccgggtaaagccggtcatgacccccaggagaagctgatagagccatacagcatgtcttgcaaagatttcatcctcttccagcagaaaagtggtttggagaaatgctacattgtattccacgtcctcatacatttttttcttggcctgttggctcagtgtttgatccagcctgctgttttgagtaagctgcaggctgtaaatttcttttgttaattcctgaaattctgaactgtgttccataagcagtaaactcataaaacgccgcctttctacggggatatttcctgaccagcgccacttgatcttttgtaagaagttattagccgaaaggacatccactcttttccagttgttaaaagtattataactaatttaatctgaatttgcaaccaatatccaattagaaaggcggaattgtattattttgaaaatattttttggctttttgggctgttttctggaatgtggattgtattattctgaaaacttctccttgtaccagttgacattttgatctaaaatagttaggataaagaaaggaaaaatattaaaaaaccgaagcagaggaacgtatccagaaagcaagatcggaagtgggagggaacctgtatggcagagaatatttttttaaaagagaagagaaaattgagtttgggagattatatgaattttgaagggacaggacggggaaatctgggagaaaacataccactccttgtgtaccgtttgatggaatattcatttcgggaagaactggaggatacctatgggaaggaagagcaggttcggattgtgcagggggcaggataccgggccggtgtgtattttgcacaaaatctggtggattcttctctggggctgaatgaatttattgcagctctacaggaacggttggaagagctttgcattggggttctgcgcattgagaaatttgaccaggaaagaggagagatcattctcaccgtggcagaggatgcggactgttcaggacttcctatgctgggggaaacggtgtgcaattatgatgaagggtttctttccggaatcctgtctgtctatatgaaaaagaaatatacggcagtggaagtggactgctgggccactggtgacagagtgtgcagatttcatgtgaaaccggaagagggataaggaaaatgaggcgcagacatgacaaatgacaattgtgagagattgtttcaatatttaaaaagcattttatatgagagaccaattcaggcactggatttagataccttggaggaaccataccagaagctggggcagggacttgtggtcctgcagcagcaggtggaggagcttttagccttctcggcagatatttcacaggggaatctctcaggtgccgtgccttccagagacaattttctgtgtgcaaatatgaaaaatcttcatgccaacctgaaccatctcacctggcaggccaagcaagtggctgctggtgactattcccagaaggtatcttatctgggggagttttctgaggcttttaacaccatgatagaacagctgaaggaaagagaagctcttctggagcaaaaggcaaaaatcgcaaaccggtacaatgagctgctggtgcaaattacaaataaaagaaatggttggaccttggcagtggatgcgcagacgaaggaaattgtatactgtaataaaaagatttccagggaagagacagatacctcgttttgctccatatgtcaggacaaattgtttttccgaaaccggattttagagcggaaggattataaacagcatgaaatatgggggatcggagatgatgcccatggcttctaccggattactacctttctcacagaatgggacggacgagccacttatattcatagtatcgatgatatcacagatgaaaagatcatggaaagcaaactcacctgcaaggcatatttagatgcacttactggtatccgcaaccgtctgtcctttaaggagcatatggaagatgtgatgaagaaaaaggacagcgtcactttgtgttatctggacttggacgggttgaagtatgtgaatgaccggtacggtcataatgaaggggatgaatatatccgcagatttgtggccaccattgaatgctctttccgatattccgatatttttgcaaggctggggggtgatgaattttgcctgatactgcctgtacatgacaaggaggctgtggagagacggctgaatgaggtgctggagcggtttgtgaaggaaaatgaaaaagactatccggtaagcttcagctatggggtggtatacattgacggggagaaaaatacgttgactctccaggagatcatcagccaggcagatggggccatgtaccagcaaaagaaaatgaacaggaataaatatcatatggggtttcccagggagtcccagtagcagcagcccaaaaaacttatggaaaaacatagagcctcaccagacagggaagcactttgttgaccggaagaatatacaaagcatatcttatgtccttttaaggacaaggtatgctttttgtcactgttctgtcactttgtttgggtaatatggtggcatcaattaagaaagggattatttattatggaaatacttcgatgcagtcatcttacaaaaacatatggcagcggttcaaatactgtgaccgctttagaggatgtgagccttaccctggagcagggaagctttactgccgtggtgggctcctctggttctggaaaatccacgctgatccacatgctgggaggagtggaccgtcccacgaaggggaatatttacattgaggatacggacatctcaaccttaagtccggagcggcttgctgttttccgcaggaggaaggtggggctggtctatcagttttacaatctcatccccacattgaatgtgaggaaaaacatccttcttccggttcttttggacaaccagaagccggatgaacagcgttttaaacatctggtgaccacattgggactgacagaccgccttactcatctccccagtgagctgtcgggaggacagcagcagagagtggccatagccagaagtctgatctaccagccagccattttgctggcagatgagcccacgggaaatctggaccggaagaattcggaggaaaccattgagcttctcaggctttccaaccgtcagtatggccagaccattctgctgatcacccatgatgagaagatcgcactgaaggcagaccggatcatcaccatggaggatggaaaaattcttcatgacgaggtggtggctctatgaaaatcttacgggaatatgtatgggattccatacgaaggaataaaaggaccagccttgccattatgacagccctgtttctcatgactactatgatggcctgcttcagtggttttgtctataccatgtggacggattccatcgccctgacgatctatgagacgggagactggcatggtgagctctttgacaatactccgggaaaaatgctggagcatatagaaaattatgcctctgtggaagcagtgatggtgaaaggcgcctgggaagttgccaaggtggctgacacaggaagaagaaattatattatcaccagaggggccaatgaagaatattggaattccatgccggaaaaggcggcagtcattgagggcagagtgccggagacttcacaggaattggccatttccaagcagtatttggatgattatcccgaaacccggctgggggatacccttacccttccggtggggcagcgtatttataatggaaaagaatgtatggccacggacggctttcatgaggaggagagcttccgacagacaggtaccaagacctacacacttgtgggggttctggacgtgacaacctcttctgttgtgccggcttatacggctattggctatctggatatggaaaccatccaggatgaggatgatcttacagtctatctgcgttttgatcctatgaggaagacttacaaggagcttcctgcacttgcgcagtcgatcggttatgagaaggatgaatatggagattataacctccggtacaatagtagtcttttagcaaaatatgggattctgcccccagagcagatacagagtattgatagtgtgaaggtgcttgctgtgcctgttatgtttttgattttggccctgcttctgatcagcgtgtttgttctggtgattcacaatgcctttgccctttctgccaatgaaaaaaggtatcagctggggacattggcagggatcggagcttcccccaggcagattaaggccgctgtttcctgggaggcattgatgcttcttttcattcccctgcccctgggcattttttgtggatggcttttggatgtggaattgttccgcattattaattctgccaatgatattggaaggactgcgccggacattgttcttaccttcggacttccggctattgtgccggcagtgttcctttctgtggcaacggcctggatctctgccagaatccctgccaggaaggttgccagactcacccccgtggaggctttgagacaggtggagaccctgaagggaaagaaaatccgcaggagccgcattgccagccggttcggcatcagcggggagcttgcagggaacgcgctggcggcccgaaagaaatcctaccgcacagccaccatctctttgtgcctgtccttcgtgttgctcactagttttctgtatattgttacttgtcagaatgcttccaaggaaatctaccgggcccaggaggaggaaaaaggtcatatctttttgtccatcagtgacggaagagctcctgagcaggaggcgctggaggaaataaagaaggttcctggccttacagacaggattctatataataagatggcctgtgccacctggatcaccggggagcaggtgtcccctgagattgatgagtacctgggcggtatggatgaggttgtggagaaaaagaaatattcgcctattaaaagggatggaaaatataggatctattcccttcttctggggctggaggaggacagcttccgggactactgtgaacagcttgggacagatccccagccttatttggaggatgcttcaaaggccttggtctttaaccgcacaagggatccttataagagcagtaagaaaaagaccgtataccgggagctgctgaatctgcagcagggacaggaaatcttgttcacagagcgggcctatgatgaagacacaggagatcatgaatttactttaacggtgggggagatggtatcccagcttccggtaaagggactggagcagtccagttttacccttgtggcagttatgcctatggaacatgtagctgagatttctaagctgtgcagtgacaagagacagtattctgcatctattacaagcggaatcttccttacagacagttcccatggggtttcctatccggccattgaaaaggcaactgcctccataaatgaaattttggagggctattatggaagcggagactatatggtctctgacctggcggaaaaagaggagatgtccaggcaggggaaccgggtgatgacaatcacggtggcctttttggttgggctgctggcagtcatcggtctgtccaatgtgtgggccagcatctctggcaatctccggcagaggagccgggagttcgccatgctcaagtctgtgggcctgtccccgggacagctgtggagaatgctgttcctggagggactgaacctgggattaaagcctgtgttctatagtctgcccattcaggcagcggtggcggcggccttcttgtatctgaacgaggtatctcttttggaatatctaccctttgcgccttatggaccggtgctgggttatacggccttggtgctccttgctgtgatcagcgcctaccttgttgggggaagaaggattcagaaccagaatattataacggctgtgaaggacgatacaatttaaggttctttcttatttgtagaaacggatagaaaacaaggcgtggcccgatggggaatttcccgcctggatctgggcattttgggcttccagcagggatttggccagggccaggccgattcctgcactgtccttggagggctgctgtccccggtaaaagcgttcaaagagatggggcagatctttcttgaaaaagccggggccggtatcctcaatgagaaactcagtatagaggggattttgctggcatacaacacggatgcttccttttgggggtgtatgctctgcgcagttcttcagcacgttcagcagagcctgtgcactccattggagatctgcttggatccagtgtccctgtcccggggtctgtgagggaaccagtgtgacaagaaaagaaatttctttttgttccaggatttctttgagaggatcagaggcttctcttaggagttcttctacctccactgcctctgtgtggaattccagggtgtgggaatccagctttgccaaagtcagaaggctctcaaccaggcttctgagacgttctacctggcgcctgagccggtccacatattctctgtcctcctcctgggagggctccagcagctctgccatgagggacatggaggtgagaggggtttttagttgatgggctatgtctgcaatcctttctgtgagaacttcgtggtcctttaccgccgtttcctttgtatgagacaggcggaccacggtcttgtagatctcgtcttccagataggagaaatcatcctctgcccgggtgagaacacctgcctgtccatggtctgcatcttgaagatactgggtgagttccaagattctttgggagcggaccttttctttttttctttcggcgaaaaaaacggccaggcctgcagcttggaagaaaaggatgtttatgggaagggcagcaggcaggttctgtgtgaaactgcccataggactgtagccgtatttttttagacagcggaggcccttttgggtataagcctgggcaggagctgttcttttgtttgcatattttagggcagagggaagggattcgcctcccaaaactgcccctgcaaggcgggcagaggtctcatattcctgcaggcttagaaaagcggcggatatacagcccaggagcagccctggaaggagccagaaaagaacggacagcaggaaggcttttgaggtttttttcatagagattcctccaaacggtagccgatcccccggacagttaccaggcagtgggtgtccatgagtttttttctcaggcgtttgactgtgacagtgagggtattgtcattgacaaaatttccctgggcatcccacagcttttccagaatgaggcccctgggcagggtgcgtcccttattttccataagaatgtagagaaggcggtattccagggcagtgagcgttagaggttccttgtccaggaatacctgcattttttctttgtccaggaggatgttcccgcaggagagggtggtgcgcttttcttccggtatcctgcgaagaacagcggcgatcctggattccagcacggatatgtggaagggcttggtgatataatcatcggcacccatgtccaggccttttgtaatatccttcacatcgtcccggactgtgagaaaaatgatgggcgtgcctgatttggttttcacccatctgcacatttcatatccgctgccgtctgggagattcagatctagaataaggagctggatctgtggagtgtaggcaagctttccctcctccatggatgaagcgcacaggcattcatagcctttgcgttttaatgcggtttttattccaaaggagatggtttcgtcatcttctataagtagtattttcgtcatgtgtgatacctcctaggagttatcatatcctatctggcggggatgtacaatgagaagttttgctgttgtcaaagaagttttgctgttgtcaaagaagaaggcgatgcacacttgtatcagaggcctgaaaaagcatctgaaaaaaagtattcgaaattttcaaaagtttcttgacatttattatattctgtgataaagtaacagcagttgttaatttcccacgtttgacactttgttacgttaaaaatcccagaaaacattgaaaaatcgatgttttctgggatttgttgatttttatgaaaagcgtactaactttttccagctacctcatttttgatctacggataatcccctgcatcgcctttgtacggataatctcataatcggttatgaaaccggcatactcgtgaagtgcatccgtcagatcagtcgcagtatacgcaggaacgtacccggcatcctttgcttttgtcacgcgcatttcccgcagagtggacacaatctggtcacaggtatatttgtccccaagtttcttttccagcacacggtaaaccagaagtgacatgaaacaggtcatgaagtgagctttgatcctgtctgcccggcttaggtatgcgggtctggacaggaactcgtctttcatgatccggaaagattcctcgatctcccagcgccctctgttaatcttcaaaatttcgggtacatcatcatcaaggtttgtctccacagcataaaagccgtcatattttttctcctcagcgatcgcatcttcattcagggaataactcacattcacctttttgcctctgctgtttttggcttcctgtttcacaaagcggcggaaatcatgctggtttttcttttcaagggaagaatggttcccttcgatggctgctatcgcgcgctggatctgcccatcccgtttgtaacggagaaagttgcggtattttaaggaaaaagtgacgatcagtgtttggttgaattcaatatccctttcttcgtcatagtcttcgatgtatttcagtttataaaaaatcttgtcgtagttttcttcttgatctttttcgttatcttctaaatgctcgatattataaagcttgctgctcccttccatctgccagccatcgggtgccaggcaccattcctgcagttcttttcccatcgtctttacggagactgtggtgacaaaggagcgctcgccgaagttgttgaacttccggtttgcctcgctggcaaggccggcgtctgtgcagacaacgaatctggacagttcgaagtcctgcaggattttctcttccaacggtataagggtggtctgctcgttgcggtttcccctcccgatacagatggcaagcgggatgccggaataatccatgaacaggcccatttggacgagtggggaaggctggtgctgcttgctgtgcccgtatttgcgtgctgccgtttccagggcatcggcttgcgcattggaaatggcgtcttcttcttccgtttcaaaatagaaattcgtgcagtcatagtagagaacaccggttttccgagggacaacgcaagagctgaatttatacagctccgcttgtatggagtcaaactccgaagcgatcacggacagtgctcttgcgacctggtggtattcgaaatccgggggctccagtaaccctttggaaagacgacaggtagagagcttagagccagggaaaagaatgcgtccgtagatcaggcgggaaaggatagcgttcatgtcatactggaaatgatgccgtttggttatgtgcctagctatcagatcgatgcagagctcatagtaaactttttgcaggaagaggtagccgatgttgaaagactgtctctcatttttcgggatgcgtgtatagggggagtacggaacaagtatcttttgattttttcttgcctgatccttctcgttgagctcagccagatgctcctgcatccactgaaacggatccgcgcagtgatacttttcagagatttcttcaggatagccaagtttctcgtaggtttcactggtgttttttccatttttgtagaccgaccggatgatatagtagcatttacctttttgtgtttggttgtacttaagacgcatttgaggcacctccgcaagatatagtatccatatggttatagtataccacaaagtacgatagtacgcaatataaaaatatttatttgacacaaaaatataagcctatcaaggctttgggggattttgagtgtcaaacgtccggcctgaaaaagcatctgaaaaaaagtattcgaaattttcaaaagtttcttgacatttattatattctgtgataaagtaacagcagttgttaatttgaatcaaagaccggaaggaacagtgaatcatattaattcatggtttcttcttttttttgtctgattaatacaaatattataatggaggtactgattatgaataacggtacagtaaaatggtttgatgcacaaaaaggatttggatttattacggacgataatacaggaaaggacgtattcgtacatttttccgcaattatgtccaacggattcaaaagtcttgatgaaggccagaaggtaacctttgataccgaagctgacccaagagacagcagaaagctgaaagcagccaacgtatacgctgcataagaaaatttctatagaaccagtagttccaaacatcttttattccagtgcacgatttgatcatccatttgaatatttgtatttttgaaccattacgttttatgaaaacaaagagaagcactgaaacccagttccggcagaagaattttgaccggaaactggagtttcagtgtttttttattacataggaaagttcttagaactttcctatgtaataaaaaccctccgggggatgcacacaatgtgccagggaaagctgcttcgcagctgcacattggcgcacaaagctgccaagcccctcatgagtgaggggagttggaaacagccttgtccgctctatttgtggaagatctggtcacaggatgtggatttatggatattatattatgaaaggagtttcacctgccataagagatgcatatcatgtgccagggtaagctgcttggcagctgcacattggcatgcaatgctgctaagccccttatgagtgaggggcgggggagtgaaagcgggcttgttccctttgctatataaggttctacggaaatataggaatcatttaatttaaatccttgtggaaaggaggagagagtggatcatgggaaatgtatttttgaaagaaccccatcatattttttcctgggaaaagctggggaatattaaagaaggccgggaagatctgggcgaggaaatgcctgttcttatctaccggctgctggaatacaccatgaatcatgtgcttgcgaaggagtatggagcccggcgggcagatgaattgtttcgcagggctggttttctggccggcacagagtttgcgggccatatgctggatttgacggctgccacggaggaattttttgcacagcttcaaagagtgctcaaggagctgaagatcggtattctaaggattgagaaaatgcaggaggatgccggggtgatcgtgcttacggtggctcaggatctggactgcagtggtcttccccctaccaatgaggtggtgtgtaattttgatgaaggatttctggccggggtcctgaaaatttataccaaaaaagactatgaggtgcgggagatcgactgctgggccagtggtgaccgtgtgtgccggttcttgtgccgggtcctggagtaggttgccgggaggcagagcagaatggggaaggaagcagatattttatttacctatttaagagatgttttatacaaccccggccaggccagtttgaaggtggaggaactgccaaaggattttcagaagctggggcagggtatgcagtttctgggaaaatgtgtccaggagacccgcagttttgcgaaagccatggcaaagggggatctgtcccagaagcctccgggcggggagaatgtactggcagctcccatcaaggagctgcagaattctctgcgccacctggcctggcagacccaggaggtagccaagggggattatagccagaccgtggattttatgggggagttttcttatgcctttaataccatgatccggcagctgaaggaacgccaggagggacttattgccgaaaagcagctcacacaggcaaagaacctggagctggagcggaatctggaactggtgatcaacctgacaaattttatccacaacatgatttttgtgtattccgcagagaatcatgagcttttgttttccaatgaatctgccagagcgttctgtaagacaaggccagggactgcaaaaaaagtcctggagatcatctgcagcaaggagtgcagtcatgtggagcaggctcccatatgggagatggaggtggataaggaagagggggaaggaaccgaatatttcggggtagagtcctactatattacctggcgggacagaatggccctggtatttattctcatggacgacacagagcgaaagaaaaaagaaaatcttatgtacaggcttgcctataccgaccctcttacaggattgaataaccgcaggtacgccatggcccgtatgaaaaaacttatggaagagaagacttcttttgtcatagcctttgtggatatggattatttaaagtactgcaacgatacctgtggccacaaggcgggggatgagtatcttaagaaaacggccagggtcctgaattccctgggaggagatctgtgccgggtgggcggggatgaatttattctcatctacacaggagcctctggacggcaggtggaggaaagcctggagagattgcgcagggaaatgtatgaagacagcagggaaaaaccatatccggaaagcttcagctatggggtgagccaggtgcccccggttccggaccggtctttagaggagtatcttatgcttacagatcacaaaatgtatcaatacaagctgacccgcaagcttcccctaaaagatgcagggtaccaggatctgcgtgggtaaatattcaaaaaaatttatatttttaatgcagaattccttgtcctgtgataaaataagagaagtattgaagaaaagaggcgaatagaaaatggcagcaggaaatgagatggtgctctactatacacccgataagaataaatatgcagtaaaactaaagggagttctcgttcagatggggattcgtattaaaaatatcaccccggaacagattcatgaaaaggtggggtatctggctggaattccaggatacgagggccagggggcggccaaggattcactgccgggtatcgggaaggaaatgatggtgctgaagaattttaccggctccaggatggatcttctttttgcggccatgagaagggctggaattcccagaatcaacttaaaggccgtgatcacccagagcaatgtggattggactttctatcagctgtacaaagagatcagcagggagcatgagctgatgaattccagaagagccatggtcattgatattgaggagccggatttcggttgtgaaggcaggccggaggactttgttgtgaaagataaggtgatcattcagcttctggagaccggagaagagaaggaagtagaagcagaggatgcctttcttctgaaggaaaacatccgggtgggttcagaggtgcttctcaccaatgagaacaggcttttggctttccaggagagatgagctgtccggtagttgtgagcagaaataaaagcagtgacaaataagaaggtatgggaggtattttcccctgccttcttttttgataaataggttgacagacgacatatatcgtgatacgatataaaaaatcatatatgtcgaataacgatatattgatgagcgatataagaaaaaggcctttggggacagtggtaccgcccaatgaaaaatcagatatctggaaaaacagaaaggtgtgacaggatgaaaagcgaaccgcttacagaaagttatttttatattcttttatgtctgtaccagggacccaaccatggatacggcatcatgcaggaaacggcaagactgtccgggggcagggtaaagattggctccggaaccatgtacggcgcaaccagcaatctgctgaagaagaattggatttgtgagaatgacaacgatacaggtcaggagagaagaagaatgtatcggcttaccaatgacggaagactggcgctcatgggcgaggtggaccgtttaaaaagtcttctggacagtgcctgggatgttatgggaggaaagagaaaatgagcaggaccaagataataaatgaagcatatgcagtatgggaatattatctggagattgaggagatcaaccgaagatctcgggaagggtggcagttaatccatggagggtgtttttatagtaaatatcaagaggatcacagtgttgtttatcgttatcagctggattatcagctacatatagaagacaaggcacggtatctggaaacattcatggaacagggatgggaatatatcaattccaccttcaacggctggcattatttcaggaagaagtatgaccctgctcttgacgaaagtgagtatgagatttatacagatataccctcaacccaggaaatggccaatcgatggatccgtatgttctgccctctggctgtcctgtcaggcattatgtttgtgctatctctcatccgcatgatacaggcaccggagttcagccggattgggctgatgctggaatttggtgttgtcctggtgctgtccctaaatgctttctggaaagcgagaagtataggagcagttaaccgaaataatgggaagggaaagaaatttcctttggcagtttatttaacgctggccattgcgggactggcactgttcattgttttttcaacgatgaaggatcacgtttattcagactttaaggggaatacattttccagtgacaaggactggacctctgagattcatgtgcgtatacctgatatctattatctgtctgcagaatgtgacagtgagattccggtgaaagtcaccttgaccggggaggacggaaaggtcctctacgagaaatccggggacaaattccagtttaaggactacaggatgtttttgggaagagggaaatatcaattaaattatgaggctgccacagaggaattccaggaaaaactggtgaatctgaaggtagagctgaattgatcatgcctcttttcagtattttttcttgacagataaatcctacaagtgtaagattaagcaaagattgaaatacttgggaggaagatctgattgaataaaaaacagaaaagaaaacctggcaggaagattctgctgaccattgaaattttattagggacagccgccattgccagcgctgtggcggcctatttttacagtcagccaaagcctgaggatatgctgcaggaatattttcaggcagcctcggacggagattatcagcagatgtacggcctgctgtgtgaggagagccgtcagatgcactcctatgaagaatttttggagagaaatcaaaacatatatgaaggcatccaggcaggggattttcacacagcagttacagaggtaaagggcagcggcacaggaaaacgcgttttttatacactggaaatggacagtgacgcaggcaagatccagatggaaaacagcgcgtttttccaaaaggagggtctgggtaaatatgctctgtattgggaacatgccctgatatttccgggactggaggaggatgaccgggttcagatatctaaaatttcctccaccaggggcaggatcctggacagaaacggtacggtactggcaggccaaggccctgcggacagtgtgggattggtgcctggaaaaatgagtaccggaagccagaaagaggaagatttgaaaaagctggcccagcttctggaaatagatgtccgggagattcaggcaaagctggaggcagtgtgggtgaaacaggactccttcgtgcccctcaagctcatcgatcatcttcagcctttggcacaggagacctatgaagcccaggaaggggaggacagcagggcggctttgcagcttcagctcctggctattccgggagttctcatcacggaacaggagagcaggctgtatccatacagagaagccgctgcccatctggtggggtatgtacagaatgtgaccgcagaggatctgcaggagcatgaaggggaggggtattcccaggacagtcagataggaaaaagtggagcagagcttctctatgaagagaccctgcggggaattgacggatgcaaggttggaattttggaccggaatggcagagaaaagcaggtgattgcggcaaaggaaagaaaagacggcagggatgtgacgctgaccattgacatacaggtccagaaggccctttatgaagcttttgccaaggatcgctccgcttctgcggccattaatccaatgacaggggaaatactggctttggtgagcacaccttcctttaatccccatgattttctcaggggaatgtctcagaagcgatgggagacctacagcaatgacaagaaccggccgttggaaaaccgtttccgggccacgtggtgtccaggttcttcctttaagcccattgtggcgggcattggtcttaccgggggctggcttaatgccaatgaggattttggaaatgtgggcctgagctggcagaaggatgagacctggggagattatcaggtcaccacccttcaggcctatgaacccgtgatcttgtcaaatgctctattgtattcagataatatttactttgccaaggcagctttaaggattgggacccagaatctggagaagggtttgaagggacttggatttcaggagagggttcccagcgatatctggatgacagaatcccagttttccaatggagaacacattgaatcggagattcttctggctgacactggctatggacagggagaggttctggtgaatcccctgcatatggccgccatgtattccgcctttgtgaatcagggaaacataatcttgacccggcttcgtatggatcaggaaggccaggagccgtactggaagagaaatgtattttctgaaagtgctgtgaaccttattaatgagtccttgatccaggtgattgaaaatcctgggggaaccggatatccgggttacattcaggggctgactttagcgggaaagactgggactgcggagattaaggccacccaggaggaccaggacggaactgagctgggatggtatgcggtgtatactccttatggagaagggcagaattccatttgtattgtgtccatggtggaagatgtgaaggaacgctccgggagcacctatgtggtgaaaggtgtgaaagaggtgctccagacctgggccggcagtcacagtccataattccgcagaatgtccctggcgatctgcgcagccttggtgccccgggcttcttgggagccctggatcagacaggcaaagggataggtattgtccggagtttccaggacgccgatgaaccagccgctggcattggcctggtcaatatttccggttccggtttttccataaagggtgcagcctctggctttttccacaagcaatgacttttttacagcttgtacgtcttgggcacgaaagccccatggattgtcccacagcctgcccagaaggcggacctgctccaggggagagattttcagagaactgtccatccagtaggaggagaggggaccggagatatcctcattaccataggagattctgtgaaaataggattccagcgcgtcccttcccccctgggagtccaaagcctggaaataccagtttaccgagccggacatggcagtatccagggtctggtcctgattccaggcttcaaagggccattctcgttcatcccacatgcgcaggctgtcctggggagtgatcaggttttggtcaagggcaaacaaggcactgtaaattttgtaggtggactgaggggcacagcgctgttgggcggctttcagatcagatgcctgatattcctgcttctgggtgtcgtaaagcacaaaggctccctgaaagtccccaaagcaggagagaaactcctggttttccaccagagcttcctggtaaaaagaggaggcactttcccccttttctgtctgggcagagacaaacagtgagcacagaacaggactcagcaccagaatcccagctattgtcaatacaaagaagatccgggccttccttttttgggagggcttttcttttttgtaggcggcaatctgtaagattctcctttttaacgaagactcttcctggcaaagggagcaggccatgggagaaaccttggctttggacagaagggcagcacagtttagaagggttctgccatagttccttctgctgtcttcctccagcaggtccaatacagattggtcacaggcgccttcctgttcactttgaagctttgtcaatgtacggcccacaactgggtggaaccaatatatgcacttgaacaggcggaagaacaggttggacagcggatccctctgttttaagtgagaaagctcatggagaaacatatagtacagatcttcctgggtgaaaaacagatcccagtccagaggaaggatcactaccggacgcaggatgccaaaggacaccggggtgggaacttccggggaggagaccaggaccggcgttctgcccatgggaaccatgtatagggctgatctccaggcatgatacaccatgggtgcgtcctggaaagaaagcttttgggcatgtgccccaaggccctgcagacggacacagtcccttgccacagagatgagcaggagcaggcttcccccagcccaaatacctggcagaagatatctgctcaaaaaagccaaaagagggctggagtggaagggaagggcaaagtcattgagccattggccgccggctgcactggccgtttctggaagcagggcatgaggggacaaaaaagaagagacggattgagtcccggcgattttcaggcttgtgatatccagaatatgaaagaatgatgaaatgccgggaagcagggatagtaaaggcaggctcagaaggagaaaataaagccgtccaagctgatagttcctgcggggagacagtggagaacaaagcctcttctttacccagagaaagacaagggtagatccccaaagcaccatccaaaaaataagaaaatctatgggaaatgccgtgttcatggacagtcctcctttaccttctcctccagcagttcatagagctcctggagatccttctgggataattcctccctgcccagcaggccggaaaccagatcgcccacatgtccctgataaaaccggtccagaaagctatgggtttcctggctgatataatcctctttagacaccaggggaaaataataaaacatccggccttttttcccgtagtcaatggcgtttttcgtatgcaggcgcttgatgagcgtctgaatggtcttctggttccagggatggctttgggccacctgctggcagatgtcattggtgcttatgggtgaacagtcccagatcaccttcatcacttcaaattctgcttcagagatctgaggcaaatcctttttcatcctctattcctcccccgtgagattaaatattcctacaaatgtaatataaagattataatccctggagggccttacgtcaatcaccttgtgtcagggttttcttttggtgaaaaaccatgtataataaaagccagtaccaaggagaaaaagaaagtgaggagtgacagaaatgagagagatcaccttaggaaaaacagggatcactgtaccacaaaatgcatttggagcactgcctatccaaagagttgacatggatacggctgtgaagatcctaagaagggcttatgagggcggcatgcggtttttcgatactgccagggcctacagcgacagtgaggagaagctgggcaaggcctttgggtcaatgagagacaaggtatatcttgccagcaagaccatggccaaaacaccagaagaattccgggaacaattggaaacctccctaaaactgcttcagacagattaccttgatctgtaccagttccactgtgtggatacatgctaccgccctggcgatggcacaggaatgtatgaagctatgcttcaggcaaaagaagaggggaaaatccgtcatataggcgtaactgcccacaagctgaatgtggccaaagattgtgtggactccggtctgtacgaaaccctgcagttccccttcagctacctttcctcagagacagaggtggagctggtgaacctgtgcagggagaagaatatgggctttattgccatgaaggccctggcaggaggattgatcaacaactccagggccgcctttgcctatatgacacagtttgacaacgtgcttcccatctgggggatccagaagctggaggagctggaggaatggctgtcctatatggacaatccccccatgccggaccaggagatcactgccttcattgagaaggagcggcaggagctggtgggagagttctgccgcggctgcggatactgcatgccctgtccggcaggaatccttattaacaactgtgccagaatgtccctgatggtgcgcagagccccttcccaggcatggctcagccaggagtggcaggacaatatgaagaaaatcgaggaatgtctggagtgtggccagtgcatggagaaatgtccctatagactggataccccaaagcttctgaagaaaaactatgaggactacaaacagattctatccggcaaggtgaaggtgtgacgtatccatgaggaatttgctcataattgaggatgaccaggatctcagggagggtcttgccttttccatggaaaatgagggctttttggtatttgaggcagatactttggctgagggattccagcagttcaaaaaaagtcccatggactttgtgattttggactgcaaccttcctgacggcactggctatgaattctgccgtcagataagaaagaccagccaggtacctattttgatgctcacagccagagacacagagatggacgagattcaggctttggaaagaggggcggatgattatatgtccaagcccttctccctggctgtgctcaaggccagggtgaaaaagcttttgcggtcaagaggggaggcccataccttttacaccaatggatttctggtggaccggagcacctgccgggtgagccgggagggaagggatattcctttaagtgcggtggaataccggcttcttgtgtatcttatggaaaataaggggcagattttaagtaaggagcagattctggcccatgtgtgggactgcgcaggcagattcgtggaggaaaatgcagtgtctgtaaatatccgccgcctgcgaagaaagattgaggacaatcctgaggagccggtttatattcaaaatgtccggggcatgggatatctttggaaggagagataaaatgacagcaggactcctggtcatagctgtggcgttggcctgtgcggccgtatgggaaaggcgcagggcaggaaaaatgtaccggcagatggaccgtcttttggatgagattctcagtgaaaagcccatatccatatccggcacacaggagggacccttgtcggttctggcctttaaggcagagaggatccaggaaaagctaaggctggagattgccggtgcggacagggagaaggagcaggtgaaaagtctggtctccaacatgtcccaccagctaaaaacacccttgtccaatgtgcgcatgtatgcggagcttttggacaatgatgggctgtccccagaaaagagaggcctgtttctgaaaaagctcaccagacagacccagaaaatccaatgggtggtaaactcccttttgaaaatggtccgtttggaggacaatgtgatcattttccagggagaacgtgcagatattaagaacaccttgctccaggccatcaacagcgtctatggaaaagcccagaagaagcaaatacagattcaggcggaggaatttccttgtgtgtatctgtggcacaatcccgcctggaccgcagaggcgctggaaaatattctggaaaatgcggtgaaatattctcctcaaaacagcagtattaccattgggttacatatttatgaaatgtatagtgagctctggatcaaggatgaggggccgggaattcctccaggggaggagacagagattttcaaacgcttttatagaagtccggctacctcccaggcagagggctccggcatcggtctgtacctgacgaagctgatcctggagaaggaaaaaggctatgtcactgtgaaatcccaactgggagaggggtgtaccttttctgtattcttacaaaattgtaattaagtcttcctcattttgtagcctgtatgaaaggcagggcctgtagaatgaaggcagatggaagggatggggaacacgtctttgttcatctgaagaaagaatttttcaatgattgtaaggaggatcagacaccatgattttacaggtggaagaagtaaccaagacctatggaaaaggagaaactggagtacacgctttaaacggcgtttctctaaaagctgaccagggagaatttctggcccttttagggacttctggctcaggaaaaagtacccttcttaatttgatcggcggtctggatgtgccggataaaggccggatcttcattaggaacaaagagatccagagcctgaaacaaaaagagctcactgtgttcagaagaaggaatatcggctttgttttccagaattacagcctgatgcccgtgctcaatgtgtatgacaacattgcccttccggtgaccttagaccggggaaaaaacgtggaccatggctatattcaggagctgatcaaggacctgggcctgtgggaaaaacgaaaaaaatatcccgatgagctatccggcggccagcagcagagggttgccattgccagagccctggccaataagcctgccgtcctcttggcagatgagcctacgggaaacctggattccaagaccacggtggacgtgatggggattttaaagtcaagcagcgagaaatatcatcagaccattcttatggtcacacacaatgaagccatagcccagacctgtgaccggatcatccgaatagaagacggcaggatatccaggagaggcggtggagaagaatgaagacagccataaagcttgcctggcaatactgccggttttatctgcgccagaccctttctctttttttcagtactgtgctgtccatggcgcttctgtgcggcatcagctctctggtgttcagcggtgagtgcagcagcagggagaaggccagggaaacctatggggactggcattattatttgaacgcagatgaggcactgaagaaaaaaatagatgccagccccaagggaaacgggtatgatgttcttaagacaggctatttggacacgaaattcgtagagggagagccgtatgtgatctcctttgtatacggggatgagaattaccgggaaatggcagggtacacccttttggagggaagctacccggaccaggagggagagatcgccctggatacctatgtactgaacaatcttcagatagacaagaccctgggcagtcaggtgactttaggcgggaacacctatacgctcaccggtattctggaaagccttccgttaaacaacaaggaggagatgaaagtctttgtgagcagcagtaccccagggcagagtaaggaatcctgggtttatctgcggtttcaggaaagagacaaggtgtatgggcaggtgcaggccctgtcaaaggctctggatatccccgttgacatttttaagagaaataatggtttggtatcctatgtgggaggggacgcagccatttctttttattatacgatcaagaccgggctgcgcctggattcagggaagttcacctacatcctggctacctttttaagagaaaaccccgggacaaacaaagggctgatcactgcagttcttattttgttcagtgtgtttattatctacagcatctacaaaatctcccttcaaaagagagtttcccagtacggggttcttcatgtgctgggcatgggagggaagtctctctatgaaatgatgctttttgagctgctggggatttttgcggtgggttaccctttgggtgcgtttttgggaaacacggcggccagtcttttgtacagccggttttccaggatctttacagggccggatgcctcagggggaagttttctcgtagacatcgattctctcataaggaatttcattttggtgtgcctgctgttggttgtggtttgtgccctgctgtgcagaaagctcaatcgtatgaaccttatggaaatgcttcggaagaatccagtgaagaagcgaagccagaagatctacagccagaaaacggaaaatatgcctgaggtgctcacaagaaaattcatgtttgagcggaaaagtacgtttgtggggatcctgttttctctgtcactgggaggaatgatcttcctgggaaccacttacatgacagaaaataccaggaccaacaatgccctcaccatgaaggcggacgatggcatggcctcagatatgttgctttttgaggaagccaattatctgtcccaggtgatcccggaacataccgtccaggctttaaggcaggttccgggagtggaacgcgttctgcccacaagctatctgctgggagagatttttgtggaaagagagaaattccgctgggggacgacgtatttcccggagcttgccgtcaaatatgatccctcccgtaagaaggatatcagtgagaggaacatggagctgtacgggggagaagcagtggaggatgaaaacgggaattaccgattgaaaaccaatgtgtacggctatgaggaccagatgctggagggattgtccgactatctgctggaagggaccatcgatcctgaaaggatgagaagagagaatacagtgattcttcagaccctgatggatggccagggtaattatgatggcctggatatcaacgtgggagataccatttccttgaaggtgccgagggaccagaatgttccagaagaggtatataaattccagtcccaggaggagtggtatcaggaaaaggaattcgtggtggcagccttggtgaacagaactatggccaagacggatttctatattggaacctccgctggggatatcagcctgatgtttaccaatgaacagatgaaggagaattttggcactgagggctatcccatgatcagcattgacacagtcccgggggcggatatttctcagacagagattcaggtgaaaaaggctgttgcaggggtgcccaggtgtattcttaagaattttacacaagacattgccagggagaatgcgtatctgaaccaaaagatgctgttttactacggcgttgccctgatccttgtggtcatcagtgttctgcatatcatgaacagcatcagttacctggtcttgtccagacgccatgagttcggcatcctgcgtgcaatggggatcagcgacagaggttatttgaaaatgatgctcatagaggccctgcgctatggaatttatgcaagccttgtgatgggggctgggtatgtactggtgagaagattcctcctgtatatgatgcagaaggtatacctgttcgttttgccccaagatgaggtttccctgtggatgatcgcggccctggcggcagggaatatacttttaagcatggccgccgtgattttgcccgccagggaaattctcagagattccattgtggatgaaatcagacgataaatatgacaaaatctgttttttctatgaaaaaagcaacagtacccatcatcggttgtactgttgctttttatgatcatgaatatcccaagtataagtcagtgtcacatctgcacacatcagctgcggaactttactgcagtgccgtaggcaatgacctcggcagctccctgcataatagcggaggaggcgtaacggatatttaccaccgcatctgctccaagttcctctgcttccgccaccatgcgctttgtggccagtgcgcgggcttcattcatcatttcattataggccttaagttctccccctaccagggtcttaagcccctgtgtgatatctcttcccacattcttggactgaattgtgctgccctttacaagtcccagcatttccagctccttaccggtgatgtaatcagtatttactaagatcatcttcttctccgctccttatctcctttattctctggacacacacatagatcatggccgccgccagtgcagccggaaccacggcaagcaggattttgatcagcatctgctccaccagtgttagaagaaggcagaaatagaagatataatacactgtgatcaatagggttatcacaattggtgccaccatctttttttcatgcttattcatagaatccctccccataacaataggctttgccatcacacggatgtgtgctggtaacttccggctaatagctttctgctttcaaatcttgtgtcacatactcattttaccataaattttatggctgcgatagagaattctgagaaaaactgcttatttaaagaatttttcataatatcccatgataaagataaacacaatgatcaagggaagaataaaggtgaggtaaggccgggcccatttgggaaacttggttcctttgccagtatctgcctcggcggtgaagtttttccagccccagccgtatttggtgacgcagaacagcagatacaccaggcttcccaaaggaagcaggttgttggacacaaggaagtcctccaggtcctgaatattgctggtccctcccagggggtggaagccgctgagcacattaaagcccagaacacagggcatggacagcaccaggatggcaaaaccgtttataagaacggcttttcttctgccccagccccacagatccatggcaaagctgataatattttcaaaaacagcaataatggtggacagggccgcaaagctcatgaacacaaagaacagggcgccccagaagcgtcctccggtcatctggttaaatacattgggcagggttacgaacaccaggcctggtccctgtgcctggtccacgttgaaggaaaagcaggcgggaaaaatgatcaggcctgccatgagggctacaaaagtgtccaggatggtcacctgtaccgcctctcctgtgaggcttctgtccttgccgatatagcttccgaagatggccagggcgccgattcccaggctgagagtgaagaaggcctgccccatggcggcaaagatcacctggccaacgccgttctctttcatcttgccaaaatcaggaaggagatagaagcgaaggccctccccgcttcccggaagagtcacactgcggatacataaaactaccatgatgcacagcaggcataccatcatcaccttggtaatgcgctccaccccgttctgcaggcccatgctgcagatagcaaagcccaaaatggtggaaagaaccatccagaaggtgagctcacccgggctggccagcatgttgttgaatacattggcaacaccgtccgggtccagtccggtgaaggtgcccttggcgattttaaagaaataggccagcatccagccgcccacggtggtgtagaacatcatgagcagatagttgcccagcattgccccatagctgtacagatgccattttgttcccttgggctccagaatgtggaagcttttggcagcagatttctggctgcctctgcccacagcaaactccataaccataatgggcagtcccaggatcaccaggaatagcagataaatgagcacaaatgcggctccgccatattgtccggtaatataggggaaacgccatacattgcccagaccaatggcgcatccggctgaaatcaggataaatccaagccgggatgaaaatttttcacgtttttgcattagtaacaattcctccctcaaaaatgttttcgtgaaacgctgctttaaaagttatcaattttcaaggtttttgtcaatagaattcaccggaagatttcaggcatttcctttattttcagcttacgcaggcttttgaagaatctgtgaatgcctctttccaccgaagacgatttttgatataataactacaatttgtgtgaaaaaacaaagacatagccacttcattgtgaatgacatcagagagaaaggaattgacagatgctatatgtaggaaatcataccacctcagcagggggataccgggcaatgggaagacagatggctgccaacgggggaaatacctttgccttttttaccagaaacccaaggggaggaaaagcgaaggctatggacccaaaggatgtggaggaatttttgaccttcgccagggaacatcattttggaaagcttgtggcccatgcaccttacaccctgaatgcctgtgcggccaaggaagatttgagagtttttgccagagataccatggaagacgacctgcggaggatggaatataccccgggaaattactataattttcatccgggaagccatgtgggccagggcagtgagacagggattgagaagattgcagaagtgctgaacctggtgctgacttcggagcagaccaccactgtcctgctggaaaccatgtccggcaagggatctgagatgggcagaaattttgaagaaatccgagatattctggaccgggtgaagctgggtgaaaaaatgggtgtttgtctggacacctgccatgtatgggacgggggttatgacatcgttcacgacctggatggggtcctgaaggagtttgaccggatcatcggcctggacagactgaaggccattcatttaaacgacagcctcaatgatcttgcttcccacaaggaccgccatgccagactgggagaaggaaagatcgggtcagaagccttggtccgggtgatgaatcatccggctattttgggaaagcctgttattctggagacacccaacgataacgaaggctgggccagggaaattgcgtttttgaaagaacactataaagagagggacgaaaaatgaagacattaattttcaatggttctcccagaaaaaagggagatacagctaaaatgatccaaatgtttatggaggaaatgggaggagagacactggtggtggatgcctatgattcccagatccgcccctgtgtggactgccgctggtgctttgatcatcctggctgtgccataaaggatgaaatgcaggaggtttttgcctacatccaggagtgtgatcacattattttggcctctccggtgtattttggggagatcaccggggtgcttctgtccatcatgagccggcttcagacctatttcagtgccaggtatttaaggaaggaggatccggtccctaagaaaaaaacaggaggcattcttctggctgcaggctcctttggaccaaaggagaaggcccaggggacagcttctatgctgctggatctgctgggctgtcagtgtatggatactatttatattgaccatacggacgctgagggagtggagaaccgcccggaaattcagacccaggtaaaaagactggcagaaactttgaagactggctccagggaggtttaatccatgaagatattgaggaagtggacaaaactttttctgactatggttcttcttgtggttctggctttgggaggatgtttgcctgcccaggcgagatccggcggttcttccgataaaaatgtccagaatcaggagaaggatccggagattcaggtaacggaagacggagagtataaccaaaaggaccaggtggctctatacatacacacttacggtcatctccccgacaattttatctccaagaccaaggccagaaagctgggctgggtgagcagcgagggcaatctggatgaggtggcaccgggaaaaagtatcggaggcagtgtgtataaaaattatgacaagacccttccggagaaaaagggccgcacgtacacagaatgtgacattaattacgaagggggcttccggggttttgagcggatcatcttttccaatgacggcctggtttattacaccgatgatcattacaagacttttgtgctcctatatggggatgaggaatagaaactatgaacggaaaatataaacggactttatatgcaagctatatagggtacatcacccaggcgatcgtcaataacctggcgccgcttttgtttgtaacttttcagaaacagtatgacatttctgtggcacagattggatttttggtaaccttcaatttcactgtccagatggtggttgaccttctggcagccagatatgtggaccgggtgggctataagcccagcattgtggctgcccatgtgtgctgtgccgccgggctggcgggtatgggcatacttccggagcttatgggaaatccttacggagggcttctgctggccatcactgtttatgcggtgggaggaggcttgatcgaggtgctggtaagtcctattgttcaggcacttcccatggatgaaaaatccacggccatgagtcttcttcattccttttattgctggggacatgtggcagtggttctgctgtccaccatattcttcagggtggcaggaactcagaactggaagtggctggctatgctgtgggccctggttccggctttgaactgctttttgtttgcgggagcgcctattaaggtgctcaacgaggaaggagagtctcttcctgtaagaaaattgtttacgatgcggcttttctggatatttttcattctcatgatctgttccggggcttcggagcaggctatgagccagtggagctcttattttgcagagagcggcctgaaggtgtcgaagaccatgggggatcttctgggaccctgtatgtttgcggttttgatgggaacctccagggccttttacgggaaatttggtgaaaaaataccactgaaaaaatttattgtgtgcagcagcatcctgtgcattttcagttatcttcttgcagtttttgcgcctcatccggtgctggccctggcaggctgcgggctgtgcggcctttctgtgggtattatgtggcccggggtgtttagcctggcagcggaatattgtccccagggtggcactgccatgttcgctctgtttgctctggcaggagatatcggctgcggaggcggcccttctgtggtgggaagcgtggcaggcgctttcgggggaagccttacctacggtctgctggcagccattgtatttccaacgctgctggtgatttttgtaaatactctgagaaaagaatatgcggtctctcaagagaccgcatagatgacatatcaggaaagtacctggttgtccagctcttttccatccaggaaggcctgggcattttccagagtggtccgggcaatggaagacaatgcttcgtgggtgaaaaagccctggtgggaggtcatggtcacattggggaaggacaggagcctttgaatggtggagctgggcaggatgcgctcagacatgtcctcatacacaaaatctgtctcctcttcgtacacgtccagacccacagcgaagaatttatggtcacggatgccctcaatgaggtcctcggttttgatcaggccgccccgggaggtgttcaccaggattacgccgtctttcattttttcaatggtgttacggttgatgagatgctgggtctcctctgtgagcggacagtgaaggctgatcaggtcgctggaggacagaagctggtccagggttacatattctacgaaatccagacttttattgggataggcgtcgtagccgatgaccttcataccaaagccccggcagatccgggccatggcggcgccgatttttcctgtgcccacaatgcccgctgtctttccatggagatttactcccatgagaccgttcagggcaaaattattctcccggcatttgatgtaagccttgtgggtgtggcggttggcggtgagcaccagagccatggcatgttcagcgacagcctcgggagagtagctgggcactcttaagatggtgatgccgcatgcccgggaagccttcagatccacattattgtagcctgcacagcgcatgaggatgagcttgacccctgcatggtgcagctcctggatcactgctgccccaagatctgcgttgacaaaggcacagatggcgtcatagcctttggccagggtggcggtttcttcgtggatattggcctctatgaatttaatctgtatatctgggaattgaggcagtaatttttcaaagaattgttcgtcataatttttcgtgccgtaaaatagtattctcatatagaaactcctttctgagttggaaggttttacctgttctgaatatatcatactattttagtaggaattaagcaataggtaatatttcacgaaaagaatggaaataggagtggtattactgtcactggtatgattccgccaagtcttttttcaaaagacagtcgagtaataactgcttctcatgtggcactttctatgatatactcagtcaggcagcggatatagaaaaagaatgcccaaaaaattggaaaattatgcaggaaagggagagaaaccatgagggaagtaaatgtgatcggcagagactttgacaatgttgaggaaattcatgaattcatggctagagagctggagtttcccaaatactatggaggaaatttgtctgcactttatgatgttttgacagatgtgtgcgatgataccaggattgtggtggacggagccgggatcataaacagcgaggtttccgactacttggaacggatggcggaggttctggcggatgccgccgacgagaatgtgtatttggaagtggaaatacagaatatttaaaaaagataaggcctcaggggccgtggaaaagcagattgtcagatgagtggatctcattgaactttctgctttttttattacataggaaagttctctgaacttttctatgtaataaaaaccctccgggggatgcacacaatgtgcaaaggaaagctgctttgcaactgcacattggcccacaaagctgccaagcccctcatgagtgaagggagggggagttgaagcaggtttgcctgctttgtttcagctcttttcccattgtaaatagaataactatggtttataatacagatatagaaacgatttcgtttatcgtcttatttttacttatgagaaaggtgagaagacgataggagtgaaatctgtcccagacaggattccttttctcacaaaagtattcagggatgacctttcctgaatgaaactattgtttagcagggaaaaggaggaaataatgtttagaggaaccattaatcaagagtcgatttctggtgtgaaggcacagtatgacacagaagtaaaaaagctgctggcgcagaaaacggttttggcctggatccttcaggggactgtgcgtgaattttccggtttgaaggtgtcggagatcattccctgtattgagggaactccacagatctcttcagtgagaataacaccgggagactgtggttcagaaatttcaggtatgggaaatgaggacaaggtttccggagagggatacgtgacctatgatatccgtttttatgccatcgttccatgcaatggcggggaaataaaactcattatcaatgttgaggcacagaaagattttacgccgggttatgaaattgtcacaagggcagtatactattgtgccaggatgatttctgcacaaaagcacacggaatttgaaaaatctgattatgacagtattaaaaaggtgtattctatttggatatgcatggatgtggcagaagcaatcggcaacgcagtctcagaatattgtattacccaaaagaatcttttgggggagttatctgataagccggaagcatatgacaaaatgagcatcgttatcatcgctttaagtgaaaaaagcaaacgaagtgattatctcacgggaatgctgggactattgctttcggcaaaaattcctgtagaagaaaaaatcagaaagctttcggctgactataatatacatgtaagcagtgatgtaaaggagggactgaatactatgtgtaatttaagtgatctggtggaagaggaagctatgaaaagaggcctgaaaaaaggcatggaaagaggcatagcagaaggcatggaaagaggcatagcagaaggcctggaacgaggcatagaaaaaggcacagaaataggccttcttcaaggaaaagtgctggcctttttcgagatgggaatgtcctctcgtgcgattgcggaacggttaaaggtgtccgtcaaggaagtagacaaaattcttgaggagaaaggaatgctcgtttattgagttaagatttagaaaggcggcagtcagaaacaggatatccactgccggcccttgtaaaacaaaagatgaaataatggaaaagccagactagaaacaatgacagttgtctctgctctggctttcgtggtttgactaaggcacgattcatggaccgattgcctctttgcctccaatcaaatataattgtcatctaataagacaaccggagatttttcagcagcccagaccggccaggtcttcgtaaaaggccggataggagatttttacacattctccgtccaaaatctgagtatctccggaaactgcctgtgcggccacggcaaaggacatggcaatgcggtgatctttgtgagaatcaatggtagctccgtgaagggcctttcccccatggatgatcatcccatcctccgtgccctggatgtcagcacccatgcgggagagattttccaccatgacttgaattcggtcagattcttttacctttaattctgcggcgttgcggataacggtagtcccttgggcaaaggcggccatgacagcaagcatgggaatttcatcaatcagggtggggatcagctccccttctatggttgtgccgtaaagagaactgcttttcacaaggatatctgccacaggctcccctccctgttcccgtacattctggagcttaaagcacacgcccatgtccttacacaccttcagaaatccatctctggtgggattgatgcctacgttctttaccagaatctcgctgttggcagtcaaagcggcggcagcaatgaagtaagcagcggaagaaatatctcccggtacgtccacatccattgcctgcaaggatggatctggcaggatggaggcagtcttgcccctggaggtgaccaaagctccgaaggcacgaagcatccgctctgtgtggtctctggaaagagcaggctctgtgacactggtggggccgtctgcatacaggccggccagaagtacacaggattttacctgggcggaggccacaggagactcataatggattccgtgaagggttctgccctgaatacgaagaggggcacagccatttcctcggatgctgacaatatctgctcccattttggacagaggatccatgatccgcttcatgggtcggctttgaatggattcgtccccggtgagttcagttgaaaagctctggcctgccaggatcccagagatgaggcgggtggtggttccactgttccccacatccagaatgcaggagggggcagtgagtccgtgaagcccttttccatggaccagaacctgttggccctctgcttctatatcaatccccattttccgaaaacaagcgatggtagacagacagtccgcgccagtgagaaaattggtgattttggtagttccctgggcgagagagccaaacatgacggcccggtgggaaatggatttgtctccgggaacagccagctccccgtgaaaggaagaaaattttctgatattcatatgtgatgtgttacctttcataaacaatgtaatttctctttttcagcaggatcacagcctggtccagggaaggctcatcatagaattcgattttaagcaccccttcttcaaactcccggttgtggataatgccaatgtttttaatactgatgccgtccatagccaaaatcgtggcgatggtggcaattcctcccgcctcgtccacaatgtcgcagtacagcacatgggctttgtgtaaaagtcccttggaggtatcgtcaatggaatcccggtagtcccgggagctgacaaacatctcatagagatgctctgcctcctggttgtcaatggaacagcggatctgaatgagcatgcggataaattcatccagcatgagggaaatatttttgccgttttccacgcagatctgctcccacatcactggtgaggaggaggcaatcctggtgatatccttaaatcctcctgcagctatggatttcatggattctcggtcatcatccatcaggttcaccagattgaccagggcggaggcgataatgtggggaagatggctcactcctgcagtgatgtagtcatgctcctgggcggtgagaaccatgggaatggctcccagtgaggtgatcagctctgtgtactgagtaagtttttccaggggcacctctcctccgggagtgaggatataatatgcattttcaaacaaatgatcggaggcattttcaaagccggtacgttctgaaccggccataggatgcccgccgataaagcgggagtccagccccagttcctggaccttctcatggataaagcccttcacgctgccaacatctgagaggatgcagccgggcctggcatggtcctttaaatattccagataagaaagattggtttccactggggcacacaggaagatgaaatcacattccccaaagcgttcatccttctcttcacagctgctgttgatgacattttctgcaacagctgccgccagggcttccttattgggatcatatgcaaacagtttgtagtcgggatgggcctttcggatggatttggccagggagcccccaatcagccctaatcccacaaaaccaatggtggtcataaaaagaactcctttctctttcagccgaagactgtaaaaaagccatcagccagctttcattgtaaaagatataagccaaaatgtcaattccactggaaaaaaggtgaaaaaacccaacagcttccatagaaaattgaaaaatacttgttaaaattatataaaatacttgaaatgcaccaaaatttttagtaaaatatgaacatattagacaaacagggaggtattacatatggacgttttcagaacagaccgaatcagaaatgtagtcctattaggtcatggtggagctggaaaaactactttagtcgaggcaatggcatatttagcaggtatgaccaaccgcctgggacgggtagaggacggcaacacagtaagtgactttgacaaagaagaaatcaaaagacaattttccatttcaaccacattggtgcctattccatgggataaggttaagatcaatgtgttggatactcccggttatttcgactttgtaggcgaagtagaagaggcagtcagtgcagcagacgctgcaattattgttgtatccggcaaagcaggcgtacaggttggaactcagaaagcatggaacctgtgcgaaaaatataaacttccgagaatgatctttgtaacggacatggatgtggatgaagtcagctacagagcagtggtggaagagcttacagagctgtacgggaagaagatcgcccccttacatttccccatcagggaagagggcagatttgtgggctatgtgaatgttgtgaagcaggccggcagaaagtatattgataagggcaagaaggaagagtgccctgtgccggagcatttacaggagtatctggacaaataccgtgagatccttattgaatctgtggcagagaccagcgaagaattcatggaccgctattttgagggagacgaattctccgagactgagatttctgcagcactggcagcaaatgtacaggaggcagctattgtaccggtatgcatgggctcaccagtgaacttaagaggtgtttccaaccttctggatgacatctgcggttatttcccgagcccagacaaacgttcctgcaacggaatttcccagaagaccaatgagatctttgaagccaattatgatttcactaaggtaaaatccgcctatgtgtggaagaccatcgtagatccgttccttggcaaatattctctgatcaaggtttgctccggtgttatcaaatccgatgatactctttacaatgtggagaagagcgcagaagaaaagctgaacaagctgtatgtgctggaaggctccaagcccattgaggtttctgagcttcatgcaggagatatcggcgccattgccaagctgaacagtgttcagaccggtgactgcctggctacaaaggccaatccgatcctgtatcccaaggctgtcctgtccataccatatacttataagagatataaagctaaaacaaaaggcgatgatgataaggttgcacaggctctcactaagatcatgagtgaagaccagaccttaaaggtagtgaatgattctgccaaccatcagactcttctgtatggtattggcgaccagcagctcgatctggtgtgcagcaagctgaaagaaagatataaagtagatgttgagctgtctaaaccaagggttccgttccgcgagaccatccgcaagaattctgacgtggaaggcaagcataagaaacaatccggcggtcatggacagtacggtcatgttaaaatgcgctttgagccaagcggcgatttggaatcctcctatatctttgaacaggttgttgtgggcggtgccgttcccaaaaattacttcccggcagtggaaaaggggcttcaggaatgcgtccagaagggaccgttggctgcatatccggtagttggagtgaaggcgactctgtacgacggttcctatcatccagtagactcctcagagatggcatttaagatggcaaccatcctggccttcaagaagggctttatggatgcttccccagtacttctggagcccattgtatccatgaaggtaaccgttcctgacaaatacactggcgatgttatgggagatctgaacaaacgccgtggacgagtgctgggaatgaatcctgaccatcagggaaatactatcattgaagcggatgtaccaatgctggagatttacggatattccacagatttacgttccatgacaggcggaagcggtgactattcctatgaatttgcacgctacgagcaggccccaagtgagattcaggcaaaagaaatcgaagccagagccagccaggacagtgacgataattaatccgttcaccaaggattcagcttgataaaaatatgctggtaagttaaggccgtcggttagaaaaccggcggccttattttaatgtcttaagttcagcagctcttttaacttttctatcggaaaattcaacttttccttttctccagtttcgcagttcgttccaaaaactgccagacctttgcccttgtcccgccggaagaattcaaaatcatcaaataccttataatgagggtccacaatctcatgaagatccagccactgctggcagccatgctcttttaaaggctgggaaaaatccaggacgatcacagaccagggatgagcccatacacagccggaaacagccagaaggctgctttcaggatcatagcatggcttggttcagatgaaggtctccccaagatcgtccgttttttccaaatacaagcagtctggaatataagagaataattgtgaatgtaccaataagtcaggcccaagccaggtgattggttctcgctctcttggaaaagaccggtggtgttcttggaaaactgattttatttggcagcgatatgcctgatattcaggggtatcatacaggttcatagtatcaccttgtcactttcggaatgcttgttggattcttcagatcaggatggtttacagctttttggaaagagtttccgggctggaggcgtaccgcaaggccgtatcctgagtgatggctccttctttatagagctttaggatactctggtccatggaacacatatcctccttcatagaggaagcaatgactccgtccagctggtggaccttgttgtcacggatcatgtttcggattgcaggggtgagccgcatgatctcaaaggcgggaatgggatgtccgtccacatccggcagaagctgttgggaaaccacagcttggaggatcaaggatagctgcagggaaatctgatgctgcaaagagggttcaaatacatctagaatccggccgatggtgttagccgctccgatggtgtgaaggctggaaaggatgagatgtccggtctctgctgcagtcatggctgtctgtatggtttccagatctcgcatctctcccagaagtatcacatccgggctctggcgcagagtggctcttaaggatactagatagctcttagtatccgaggcaatctcacgctggcttacaatgcatttatcatggcggtgcaggtattccagagggtcctctaaggtgatgatatgcccctccctggtgtggttgatccggtcaatgaggcaggccagagtggtagattttccactcccggcaggacctgtgatcagaaccattccttttgtataatcggcaatatccatcactgcctggggaatgtgaagggtatggtattggggcagagagaaggaaatcacgcggattacggctgccaaagagtttctttggcagtaagcgtttacgcggaaccgggaaagaccgggaatggaaaaggagaaatcatcatctccttttttcaaaaaaggttccatatctctgtttcccgccagagaatacacagcctccagaaaattacgggtatctgcaggcataagtacattcccggtggtgatcagccgtccattgatcttcatggacagggcgcgtccggctatcagaaagatatctgaagcatgagagtccgccgcatattttaaggattcaatgacagattgttcactcattggtgttctccttcctataaaccggctgcttctggtcaggtgtccaggagccggcagtgatggtgcaaaattcctttgctgcaaggaacgggtctccctccttaagggggtagagaagttctgcagtcacttgaagctgctgcttttctgtgatgggaaaaagcatggtaaccgtgcgctcttctttatcggtgaacagctctggaaattcttcagggagctgttcaaataagaaacgatagtaattttcccggtttttttcttgaaaatatgctttctccacaaaggcatccaaatctgcgtaaaaggaggatgcctggctggctgcctgataataggctgtggttttttccagagccttctggctgagctgtctgtcggatcttgaatttcccaaagtgagcagagataggatgcccaggcagagcactgtaaagatgagaaacacggaagtgattcccatagtcacaaaggactgaggctttttcatgaggccgcctcctctccaagggttctgggaacgggaaagcgaagatcaagatggtaaagctcccggccgtcccggtcatagaaggtaagagcggccgtcttctcctggcccttgcggtctggttctatgcgcatggtatagaacgcttcctttggagcacaggggttccagcctttgtcatagtcatagacaagagcggcatcttcctggcggccgttttccatgatgtccagaaaggactgtaccgtaccgtcggtggctgataaaatctctgctgtgttggagcaaagctgctgaatgtggttatcctgccttgcctgtgttctacacgcataggccagggaaaaaatttgaatgcaggcagcccctgagagagccaggatcagcagggaaaacaaaagttcaaggagaaacagagaggttttttgatgctttggaatttgactcatgacacacctcccggtttctgttcctgcaagccgcattttgggtgaagatagagggtactggactcgccggaagaatcctggactgacacctgtaaaagatcatttttcaaaagtgacagttcaaatttttctacggaggcaatggcagtacccatggaaggagaggcctgtgactggacagaggtgaacagctccttcaactgaccgtcctcctggtaaatataggtgacgaattctcggtctgaatacacatctttcagacacagagcctggtgtccgtccagagtgcccagccaaatgccctcctgtgtgtcatgctgacggaccttttctgtaatataagacagagaggtatacagaccgttatttttggaaagtccctgggcagaggccttataagtctctccggagaacagcagcagcaaaagcagcaaaaacacatacagggcaaacaaaatcattgtaaacagagagtccatccgatgttcccttctgaatatttcgttcatgaagcagcctcctttccctgtcttcccagagggatcacagaaatggaaggcagcaggttggatgcagtggggacatattccacaataaatttggaagggtcataggtgacggggtactcccttatgagcgcctccagactttccgggtattcgccattcagggcataggcatgcacagccccccgcaccaaggcattttccagagtagactgttcctggcggagtgttttttgggaggtatatgccaccccttgataaaaagcaacacatagaaccgccagaacaaacacggataagagaattcctctgcctctggagaaaaatcctgattttttttcaaaaagatccatcgcgttcacctcaaaccatcatttctgataacaaaccaagcaggggcatgatcacagacagtagaaccagtcccaccagcagggacagtatgatcacaatggtaggttccacaatggaaaccagatggcccacctgattcatggctgactcctgatatctgagggagagcttttccatcacctcgtcagcggcgcctgcccgaaagcccacacagatcagacgggcggacatgccctcaaacaaaccggaatccgtcagggcctgggaaaaaagttctccttcctccagcagagctttggctttatccagctttttccgcaggagaggatgagtagtcaaaagggcagccatttccaggcttctttccggccccagcccgctgcgaagacccagagccatgcccatggaaagacgggagtaggcagaggcttcggaaattttacggattccaggcagcctttgtttaagagtgcctaaggcctgttttcccttggaagtgaagcagagccacacgatcacggcggcagcagccagggcgattaccaggataaccataaagtagcggcccattgagctgccggctttgagaagccctccggaaatgccattcatctcaagacccatctggcggaaaacctgttgaaatacagggaggacctttaccagaagaatcccgatgacaacgcacatcatacccagcataagcagcggataagacaccgcgctgcgcacatagtcggatacatcgctttcttgctgatagtaggaagccaggctgtccattacctcatccagacagccggtttcttcccccaccttagtataagagatcatatagtctgggaaaagtccggacttttccagggcggtgcagagactgcctgtgtccaccatataatccagaagagactttagaatgctccggcttctgtctgtgcggctgtcctccagaaggatccgcagtccctcctccccggaggtgccggattttaagattaaggcatattgttcgcagaactgagaaagttcccggctgctgatctgttcttttgacataaatgaactcctttcctgctggaaaattagttggggtcaggccctgctgtcgtacggacagcagtggttacctggtgaattgtacggtatagttggtgccgtcgccgatataatccaggatactgccgctctggtctgaggcggcaaaggtgggatccatgcgggtccaggtatccccgtcaaaggcgatggccttgttaatccagcccttttctttaatatatacatcaatccaggcatgctttacctccccgctgtagccgatctgcagccggcagggaatgtcccggcttctcaacatggcagtcatcagcgccgcatagtcaaagcagatgcccatgcctgtgtccagagtctcgtccacatctgggagatacccggcttccacagtttctgctttctcgtaatcatagtccacgtgggtgatgacataattgtaaatggcatccagcccctccatgtccgtggcgtcttccgggagcatggagagtgccaattggctggccttgctgtctttggagaaatatacatattgattggcatataaataaggaagaaaggggttgtccagctttacagtgagggtttcggtatacagggccgcatatttactttcaattacattttcataggcattgaccaagtaatcaccctcccctgctgtgaagggaatggctgactcttctccactgtccaggaaataagagtaggtgatcccatcaggtcctatgatctgaagattcagacggctggagccctcctggctttgagccacgaaatatccctggcttatgttagagatatccagcagcaatggagaggtgccaatcacctgggatcccggtgcttccggttccagaacggtaagtggacggaattggggagggtcccctccggaggaggtatctccctggcctttgccgcatcctgccagaagcacaaagcctgctgtcagcagaaaaaggaaaaggcggatatatggaaatctgcgcattatggccgctccttggtagtgattagaatttaaaaatagataacttataaagtttagtatagcagatttacaaaaaaaaggaagagaaaatccagtctggagaggagactcgtaaatggaggaaatgcgtaaacgttttgcaggtttttatttacgaaaaaatacgacaaaactggagtaaaaacactcaattttgttgataagaattgtgccagaagatataataaatcaatgtgtttttatttttgaaaatcccattagcctgggagacaaaaacactggaacccttagtaccagacggtttcaaggagacacaaaaattaagcaggggggactaaaatgaacagaaaacataaaaaatcaggacgtattttagcagtacttcttacaatggcaatgctcggacaaaacagtctggtctatgcagaggtggacaattaccagctggatcaaagagccggattgcctgatgacggtaccggaggctcaaacgggagtggctccggttcagacgagaatggttccggagactcaaacgggagtggctccggtttagacgagaatggttccggagacttaaacgggagtgattccggttcagatgagaatggttccgggggctcagacgggactggtgccggcagcggctcagaccagactggttccggggatggctctggccagaatgactcagaccagggcgggaattccggagccgatggaggtgacacggaccccatacccccgtcagatacttccgatggtgatgactcacaggattcttctgacccatcggatggatcccagaatgggaaaacggcaatccaggcgtccgttgggcagtatctctataaaaacgatgatggaaactactatgtagattttcatgcagtggtaaccaacagcggtgacagggcggcagagggtgtgagcatcaaggttctgcttccggaagaaattcagtatttagctcctatggcaggagcagaaggcttgtccagcttcaactcccccgcagaggtggcaggttacagccttgcgtatccctatttgaatctccaggaagtgcccccggaggttcaacaggagcaccaaaacggccaggtagtcatgtggggttcggaaaccattgatgtaggtgcaaccaaggagtattcctttaccgccgcccttacagaaggggcagctaattatcaggccctgggaattcaatggtatgtaaatgaagcatcctacggcgccggcaactggactgtacaggatgggctgatcccagaagggaacaatggaatacttggcgggaatccgcctgcaggggatgaacaagggccgggaccagggacggatgatggagatataaatgatactaccattaaaagtattgtttctgtcgatggtaagataagttgtagattagtaagtacgagtagctgggaaacaaatgattctgcatcgatggaagaaacagcggaaattaatagtgaaatagtcccggaaatagaagatgccataggaagtttaccagagaaacaaaaagcacatggtttcaaattttataatttaaatattgttacttcaaataatgtagaaacaataagaggagatttatcaatagacaaaagcgtttttgccgaatgcgataatgtgtatttatggaatggcaaatccttggatccagtgcaagctgacgattcaacctatatgattaaagatgttcttttaaaagtaggagaaaatggtatatattttgtctcaacagttggagagactgatggtttgtatagtatagatgcttctgcggaattaaatggtattcagtttcgagtttatgcagagaagttggccaacaaacctgaccaggtaaccttaaaggtaagtgaaaataagaatacctatcaaaccccaaatacatcaataggtgatatcgtgaaaagatacagacagcaggcatataatctttcattagtaggaaatacgaataatgaaaacattaagtataaggtattcatagattacggaagcacacctttatttactggattaggtgcttataatggatatactgtttataccataacaaacgaagtattgggggaggctattccgtcagagaaggtcgagattgtaaaggcagaaaaaggtacctgtaaaagtattcggtatgagtcaggagaggttacacctattttaatagaaggctccagaatttccgcctcctatgatatgtcagaggagggagatgcacaggattggattgaggaggttaagctccagtataaaaacagtcaggggcaatggaaaaactatgataatagtcatgtcttttgcaaggatgaacccttcaagatgaagattgcctttcaggtgcctccaaatacaaagcagccttcttcgaatgtgtatttgtatccaggcgacaaaatatcgttggcaattgacaatattgacttaagtgcatttcaaggaaaattaacgtccattacaaatggaagtaaagagattggaacttttacagtttccaatgaggctgtgaatcgcatagacatacagtttaatcaagaatttttatcacaggatgatgagggaaatgcattggatggcaagctgggtgtttatgcacagctggaattgacaggtttgctgggatttaccaacactgaaagtgaaaataaaacagagacaatatatattggatccgtacctttacaattccaggtgagtgaccaggaatcagagaaaaaagcagatattaaaatcgaaaaggaaattacagaaaggataagagaaagttcttcatcagtagtcaaagaattaaagtatgggattaggattacagcggataaagataatgacattccattgacggaaattaaaattgaagatgcctttagcagctatcagaattatttttctgtagtgtgtgattctgcaagtaatcaaccaataataagtttagttagagaaaagtcaaatattgatgagagtaaaacaataaattttgattcaccgacctatgagggtggtaaactgacttttccaataaatatttttgacactgttgctaatgaaagtgtcgggttgatgtcaggagaatctatttatcttacctattgtgtgaatgtagatgaggcaatttattatgattgttctgtgacaggggctggctccatctcttcaggatttactgcaaagaataatgcaactgttacatataataaagataagagtaagtctgcgtcatcggaattcacagacacgaaggagtgggtattaaaagaatatgatcagatagatgctgatggcaatctacattatacagtacatattaattataatcctatttacaatatatctggatggagtattgaagactggctgatagataattatcaaagctatcttattggtgaaaacaatcctatagaagtgaagtattatacatctgttaaggatatagaaccagttggtatggaaaagattacgtctatacctgatagtggtaattgggcatggtctgataaaaatcaaaaacactggaaatttacactttcagacaatatacctgacacaactattcctagggggaattgctatcttactattggttattggacaaaggttgatttaggaaaagatggttatgtaccggaaaagacattgtccaatgcattaaaaatagctcctccaaagggaactggaattgaaacccaaataccagatatcgaatatggtgtttacacacttaataagagtgcagatgatataaatatctctgagaacacaataagatggcatagtgttttaaaggcatataagaatggagcatcaacttcatccaatattcctaaggatacagtgtatgaagacgaactgtatgttgaagaatttgcccaaacacatatctttgataaaagtactattcaacttaaggtggagtctggagataaggaactggctgaaggcgaagattttgaatttcaaatgatgggaacagaaagtaaattcaaaattgtctttaaaaaaaatgtggcatctccggtaactatttcttatacctcggtagctggtttgggagcgggaactcccaataaggaaacttatagtaataaagcacagataagtgtacatgaaggtacatggacatccggctggaaaattgccagtaaagaatatcagaaaagcagcttaatacaaaaaaaatataaaaattttgatcgtgataaacgtgtcattgagtggacggttacattaaacgaaaagaaatataaatttaataataaatccgttcaattattagaaaatcttcctgaaggcatagattcaattgaagttatagatggaggaacgacaacggcttatacggtcaacggtggtaaatgtgtcatacctatagatggactgtcaggcaacaccaaaacattgacaataaagacaaagctttctgatacagttgatttggaaggaactcagcagttaaattttataaataaggtggaacttcaatttgacggtaaaactttggctgatgctacagcagatgcacacataggattggaaaagctgaataaagcttcagtctataaagatggcaatgtgttagactatacactctatattaatgaaaaaggtgaaaatttaaatccatcaagaggtggaaatacgtattatttagacgacataatgttgtccaacatgtctcttgtgcctgattcattaaaaattacggatttaggaagcctttcagacatcacacaagcttgtgtaatgacaactataacgaaaaacgatggaaaacatggatttacgttggaattgccagacgaacggcctattaagattgtttatcgggtatccttccggggaatacccgttggagcaaccgctgaattatccaatacagctgaactttattacgataatattacaattgaacaagtttccgataaaaattctttccaagttaaggaagcatcgggaagcggcggtggagcagtttccatacaaatctataaagttgacgagaataatttagataagcctctaccaggagccgtgtttgagttatatcagtataataaagatgcaaccggtaaggaatcatgggaagaagtcacacaggaaggcaattataccaaaaggacagaatcctatacctctggggaaaatgggattgctaaaattaccaatattctccggaaccggtattattatctgaaagaagtaaaggctcccgacggatataaagcagattcaaataaaaaatttgtttttattgtggataccaagggttacacattcgatagtttaggagagaatgaaattactgtaatcaccccggaccagacaaagttctatgtgacaaatgcaaattcagaaatcaccctgaataaggtatttcgacaggatggaaaacttgcgggcgatggtttgtatccagatggaaattattattttacagtctatgattccattggaaaaagagtatgggatagtgatcaggcagaccagtccatcacaattagtaatggcagcggaagtttgcagatgggctttaagctgccttccaatccaggtaactataggatttatgagactgataaagaggggaggattttgactgacgaaggacataaggggtacataatttctggaggcaatcattttactgttacaaaagaaaatgacggtttggctggaaattatggtacagtgggcgttgactttcaggtaaatgagaagagagaaccgattaataacctggaagttgtcaataaccttatttctcctaaaattaaaattcaaggtttaaaaaaattagagcaaggtaaagtaagtgccaatgactaccagtttactattgaagggccaaatttaagaggtagtgacggacatcttcaagaaagtcagactgtttacaacaaagagcagggcttctttgaatttcctgaaatagcaattacgaaggcggctgtattaaatggaactgagccaaatgaagaggggatttataagaagacaataacatataagatttgggaggttggcggaggaagtactctgaatggaatttcttatgataaaacaatccatattcttaatgtggatgtgacttataaggagtccacagggctgaaaattgacaatgtaacactggattcgcagaacataactcctgacaatgatggcaactatttaataagtaaggaagatttgatatttacgaataaaccaactacaaaggggacacttcagttaaaggcagctaaaaagtataatcaagaaattccaaaggatgtctttcagttaaaaattacaggaccggacggatattctgatgtaaaaaatgtaaatgcagaaacagggatagttgaatttaatgaatttgaatattccctggaggatgttgacaaaacatttgaatatacaattcaggaggtgataccagaacaagaccagcaattgtcaggtgtagagtatgatgataccgtatataccattcaggttgaagtaacgaaagatgcggcgaacaatatatcggcggtcccatatttagtccaaattaataatagggaagttacgccggcgattaaaaatccatccttaagtaccttagtttttacgaatacatatggtgcgggctgtaagcttaatgtaaccgcattaaaggaattggcaggtagagatttaaaggagggagaatttaaattccagataaagtctggaacagatattatttcaacaggaaccaatgcagcagggaatatggcagatggtattgcaacaggggccattacattcaatcctattgagtatacctttgaagaggtcgggaaagaaaaaacttttgaatacgaaataatagaagtaaaagatgagactattccaggaattatataccaggatgagcagtaccgcttacaggtaaaagttgtaaatgtaggagacggtacattggcagttgaaaaggtttttgtcaatggtgctgaaataaatcctgttagcgatagtacttataatctttctccaaaagtagtattccaaaatggctatacttcggaaggtatatttagccttaaagccgagaagcgtttagaaggggctgagttaaaggaacaggaatttaaattcaatttatattcagctgaatatgatgaggctgaaaagacgttttctacaataggaaagactctgcaaactgcagttaatgagggaaaaaatatcgtatttgaggatattttctatactttagaggaagctggcgagattcattattatatcatgaaagaagagaatacggataatcaatatttatatccaggcattcaaaatgatgatacagaatatatcataaaagttacgctaaaagataatgaaaataaaaccttgacagttaatgcggaaattagtacagataagggcaatacatggaaatcctatgataaggagaagtctaatattaccttcaccaaccgctacagcgccaaaggcactttcacacctcaggccaccaagaagctcattggagccgatttaaaggatgaacagtttaccttccagttagattccattactcttggaaaggatgcggcctggccggaagatgctgacaagctttttgaagcggcacaaggagagcagacaccaccagaggataaagatcctgaacagaaggcagcgtatgtgatcaacagccatggaacagttgcaaatactggttcgaatatttcattcagcccaattacctacatctttgatccttccaatccagatacggaaaaacggatggaccagactggaaaatatatttataggatcaaggaggtagtaccacagaaggataagcaggtaccaggttatacctactccgatatcccagtgtatatctatgtggaggtaactgataagggagacgggaccctggctgtgcagcaatataaggataacaaggaaaatacctatgatccggagactgctacgatcacaaatgtataccaggcaaacggtgaactgcagttaggaggaaagaaaaatctcttaggcaggaagatcagtgaaggacaattcgcatttactctagagatggccaaaatgaaggacaacatcctgggagactatgaacaggtaggaaattctgtaaaaaatgacaataacggcagctttaccttcgagcctataaaattcacaaagggcggcaaagaggataccaacgacctgggaacctactatttcaggattcgggaatcacgtccctcaaacgatgagccaggctacacttatatgtcaaatggaattaaagaatacgtgataaaagcagtggtaaaagaagcagatgagaattcagataatctgaaaatcaccaccacgctggttgatgacaagggagagagagattatgatatggacgccgttgtatttaccaaccagtacagcagcaaaggtacctggacgccctcagcagagaaaaccttcaatggtgcacagctaaaagcagaccagtttgctttccagctttaccgggagggtgtggcagagcccatccagactgtgaaaaacaacgatgacggcagaattacctttgcccctgtgaatttcacagagaaagacttaaacaatgcaagcaaagcagtggtgaattttacagtaaaagaaaaaattccttcagcttctcaggctttggctggagtcagctatgacaccactcagtataaaattgccgtagccctggaggatgacggaaaagggaatctgaaaataactccggcgatcacaagaaacggcacttccgtggccaagatgacctttgccaacagctttgcaggaactgcagaaattttaaagaccgcagaggacggaaccacacctctggccggagtcaaatttaagttgtacgcaaaacgcttaaactccaatgtatatgaggtatatacgagagatgatcagagtggaacttacacgaccgacaggaatggcaaggtgatcatcaccggacttcctgccaactcctattatctggaggagacggagacgctgccaggatacgtgattgagacagactccaaagggggacctgtaaaatatgcctttgacattgaactgcccgcaggtgctggaggtacaggcaatgccgtggtggattataaaaccacgatcaagaattataaatgctacggagaggcaaaactaataaagactgatatgctggatgcctctaagaaattggaaggtgcagaatttgccctctataaatctgacggtaccttagtgaaggtgaaggccgcctcagacggaacctatgagatggataagacaggaagcacagacagcctttccgccttgacaacaggagctggtggaagcctgaccgtgaccaatctggattggggaagctattacttccaggagaaaacagcccctgacgggtatttggtatcggatgtaaaatacaattttgtcattgacaacacctcttttgctgtaaatgacttaggagtatatgctccaaagactgtagaggtgacagccacgaaccagggaaccacagccaatatccagaagctggatgaatctgacagccccctggcagaggcagtgctggaggtgaaggatgctgagacaggagcagttcttgatacctggacctcagacggaacccctcaccagatttatggaatcctcataccggggaaaacgtattatctctccgagatcagcgcacctgcaggttatcttatcgcaccggatgtggaatttaccatgccggcctcaggaactgtgaatgtgaccatgactgacccagaggagggaggagaattaggcgagatcaatgtgacaaagaaggcaactgtcatggaaggtatggaggaaaaagaactgatcgccacagatgccgtgttttatgtgggactctttaccgatccggagggaaaacacccctatggccctgattatagacaagagcttcacatggtgaaatcctctgtatcagatacagttgtttatagccagcttccccaggggacctactatatcctggagctgaaggaagacggaacccctattcccatggatgagattcaggaagatgccggcggcacactattcgtatgtaccgtggatgggccaggcagccaggcagatatccagggctccgattcagcccagattaatttgatcaaccgctattatgacttcccggacggatttgcctaccgggcgtatattgacatcaccaaaaaggttctaaagggtacagaagaaatcgcaacagaggataccttctacgcaggaatttttacaagagaggaggatggcacctacagtgaagaaccatatctggtaacagagctggatcagaacggcacggttaccgtggaggtgcctctgggaggagagaagggcaaagaccccatcacctactatgtttttgagacagatgcccaggggaatatcattgacttaaacgaatttgcctatcacgtgactggagaagggaaagttaccttaaacgaagcagatgcaactggtgaaattaccattaccaatcaggtgaaggaagaagaggatacgaagctgtcagtccagaaggtggacgaaagcggaatgcccatcgccggcgcacaattccagtttgtatcatctgacgcagagacactgtctgcacagtggacatcttctgaaagtgcagagatttttgaactggagcccggaacctatatcttgacagagactgccgcccccaatggttatgtgaaaggaaatccagtcactgtcacagcaggcaaggacggaaagatcaacataaacggcagtgatgcaaagcttgagggaaatgtactgaaatatattaataaaaagcagagctccggcagctccgggaccaccccggtaaccccgccggcttctcaaaacgcacagaatggcggaaatagagcaaccgtaaatgccatcaaaactggtgatgacaccagggtactgccatttatggtcctgttgggagcagcggctcttaccctggcaggagtattcctgtaccggagaagaagagttaataagtaaataccttaggaggctggcgaatgtcagcctccttgctttcttctgctttcagccagatcggaagactgttttagcctgtcctggaaagtggataaaaaaaatcaaaatatctcagaaagccattgacaatgtttcccaaatagtgtatgattatagcataaaaataaaggcaaactcattgaaaagtggggacgcaaagccaagggtctaaggtcttcggactatgacagccggttgccgcatggattcaggttgtatggcgttatattctggatgtaatatgcccacagggcacggtaaccgtttcttgagtagagagaacggttatttttttatcctgaatacgccaaatatcagaaaggatgtgtaatgaatatgaaattgaacaaaatgaaagaggtattaaaatcaaaaaaatgggccggaaggattacggcaattgctatggcagctatattgggaagcgcggcacttctctcttataagagccaggtaccagaacttccttcttatgttgacccggtaatggaggtttccattgaggatgaggagacgcctttggcttctgcccctaaggtaaccaccaagaccaccaagaagacaacaaccaaaaaggtgactatgaagagtgcggcctccaagagttacaccaagtcccttcctaccacaaagaagaccaccactaagaccagcaacaccagcaaagcaactgtaaagactgagacaaccgtagttacagctacaaaggaaaaatatacaaagaaatccaaaattaaagtggtaactgcaaccatcactacaactgttaagaccaccacaacagaaaaggttcagcagcccaagatagctcctgtgcctgaacccgtaagtactaaaaaatatacagcgaacgtgagagagcttgcaccggcaatggatgcccgtgttctcaacgcatatgaagctcttggattcaaggtgaccgttgatccttccgtaagctatgcaggatattttgatgcgcagacagctcagatcactgtgaaggcagccgatgacaccatctatcatgagctgggacattttgtagcgttcctggcaagtaatgctgacaaacagtcttctttcataaatgtgtacaacaaagaaaaggccctctaccagggagcaaacgtaaaatattccacccaggacagctccgaatattttgcagagtccatgaaggattatatcatgaataatgcagctctgaaggcttccagacctctcacctatgaagccatcgcacaggctctgggtaagatcacagatgcacagattgcaaccgcaaagaaaatttatggacccatttgggcgaaagcctaagccatgaatatagaataaaaaggatcagagatttttgggaccggcgttttgaaggacgccggtccttttggtattcatgtacttcatacatgcccagaatacatgcttatgggatgggaaagaataaaactggaaagatatgcggaatatgattgtgaaatggaagaaaaaatgttaagattaagacaatttaggaaaggagatactgttaattaacagtaaatcagtatgaaaaagttgaaaggcaagcttatagcagtcattctgggacttttggttatcggtatttattattatattaatataccggcgatcaatatccattcctccgggttttggatcttcattatcgcagtgatggctgtggcactcattatctattccttccgaagggcccacaccatttctgagatgaagcagaacaagggcatccgtatcggaatcggtttgatcctgctggtagtggcagtttacattgtgggcagcgtgctgtcctcaccaattgtcaatgcaaagaagtaccgggatttaatgacaccagaaacaagcgattttacacaggacattgagcagatcaattttaaccagatccctttgctggacaaagattccgctgagcttttgggaaaccgaaagatgggaagcatggtagatatggtctcccagtttgaggtaagttccctgtattctcagattaattatcagggacgtccagtgagggttacaccactggtatacgccagccccattaagtggtttaccaaccgtaaagaaggaattcctgcctatatcaccattgatatggccactcagaacacagagcttgtgaagctgaaagagggaatccgctattcagagtccgaatattttaaccggtatatttaccgccatttaaggtttcaatatcccacatatatttttgaccagctcagctttgagattgatgacaacggggtaccctattggatctgtcccgtgaagaaatttaccattggtctgttcggcggccagaccataggaagagtggtgctttgcaacgcagtcaccggagaatgtacagattatgatattgaggactgtcctcagtgggtggaccgggcatatccggcagatcttctaattgaaatgtacaattatcacggaaccctgatcaatggtttcttcaacagcattctgggacagaagggctgtctgaaatccacccagggctacaattatctggccctggacgatgatgtatgggtatatacaggcgtcacctccgtgagcggtgacaggtccaatgtaggttttgtgcttattaaccagagaaccagggagacaaaatattatgagattccgggagccgaggaatattcagccatggaatctgcggaaggccaggtacagaacctgggttacaaagctaccttccctctgctgctgaacattgccaatgagcctacttatttcattgctctgaaggacaatgcaggtctggtgaaaaaatatgctatggtgaacatccgcagatatcagaacgttgccattggcgacacggtgtcgtcctgtcagcagacgtatctgaagcttctaaaaacaagcggtgccggaggcagcatcaacacagaggatgcatccaagatcaccggagtcatcaagcgcatggcccagggtgtcattgatggtaatacccattactatattgtgctggaggaacagccagatctgatttttgacgtgcccctggcagatttcctggatattgtaaaatacgatgtgggagacaggctgaccatgtcctacagtgagggacagccaacctgtaccgtccttgccctggggggagatgccttgggagaggatccccttttcaaagaggatggaaatacacagaaggaccagaaggtacaagacgagaacgctgatttaggccaggatgagccagatggagcgtcccctgagacaccggaaggatcagatgcgcagcctctttccaacagtggagagacggccgcctagaggaaagtgacaaagaagcagcatacaaggagatagtcatgattcccctggctttggcaggggatgaatggctgtatggggagagaaatgaaaagatcaggaagaaaaagaagaacatggctggcggcagttttgatcatctgtgtgctggcaggcggattttcctatggggagacaccggttcaggcagcagcagcgggtggggagcagattgcccagacggccatgaaatacgtgggatacccttatgtgtgggctggagaaagcacttctggttttgactgctccgggctggtgacctatgtgttccgccagtttggaatcatgatgccccatggcaccatgtattttcagggaaacgggtataaaagctatggaacgaagatttcctctattgccaagatgagacctggagatgtggcctatttcggggaatctgccaagaatctcagccatacgggaatttatctggggtatggcaaaatggtccatgcacagaatacccagacaggtgtggtggtatcagatctgaccactggatcctattatggccggctttttaaatttgccctccgtcccaaggggatgaaggcaggagttctacagagaaagtacaccatcacctactcctcctgcgggggaaccggcagcatggcggcccagagtgcggactatggaaagtctgtaaagctgcgcagcaatgccatgaagcggaccggatatgcctttaatggctggtatgccaaacgggcatctgacggttttctgctgtataccaacggttatggagatgtttggcttcccaggggaacctacagcggctatcaggtgaaggttttccaaaaccagactcctgtaaagggaatcacagacgtcccctacgaccgggtgaccatgtgtgccagatggaagtctgccggaaactctcttctgaagatcaccggaggcgtatatccgccccttgctatgaagctgggcacaaaggtaaatcttgcggggaagattacctccaactattcgattaatgaagttaccgtgatattgaaggacagtaaggggaataaaagaaaggttatcagggtcacccccaaagcccgcagctatgatctgtctaatataaggaaatcctttgatttttcaaaactttccaaaggaacttacacctacacagtgacagcgaaggatgcaaaagctggaaaaacactggtgaacagaaaattcaaaatttcgtaagtgaaaattttcatatattaaatgggcagaaataagaacaaaggctgacagattttcagattgaaagaaaatttgtcagcctttgtgtgtctccaggagaaaaacttttggagttttctagagaacttttcctgcagtgggacagtgccgggtggttgaattgattcacggaaaaccccttgcactggtataaatagaagagtagaatggtatggaataaaatccggagtaaattatgagaaaaaagcagaatatcattgtaacaattctattgattggaattataggaggcgccatagccttgaacagccggcttattacgataaatgtatgtttcacagcttttgtggctttggccatggggatttattttgtttgggtgcttatgagtgtgaggcgggacagcagagaaaagctgctccagctttccagggtggagtatatgtacgatgtagagaagctgctctttaatgctcatatggtggcgggaaacatggaaaaagcgctgtgcaaaattgcccagaggctggatgcccggcaggcattttttttcactgtaaatgggaaaactgtggtggacaggtatctttgggattttcagggacgaggggtgaaggatataccagatgatgacatttcggaccttctggagctggtgtatcaagcactgaagcaggggcagagcattctgcccggtgatcttgaggagatggcagtaaaggactccaaggataagacagattatatggctctggcaggaaaaaggatcatctttgtgccagtggaggatacagacggacgcctggccggagttctgggtgtgtcaaacacgaagcagatatgggaggatgccaggcagctggaatgtgtggccctgaatttttccatggccattcataatagggatgtgtatcagacaatgcagaccatgagtatgatagacagcctgacaggtctgtttaacaggaacagctatgacgccaggatcgccagtcttgagaaggaggactgccgctccgctgcctgtgtgtacatagatgcggacggccttcatgaggtgaataatcatctgggccatggggctggagaccggatgcttcaagtgatttccaaggaaattataaatgcctttggccacaaggacagttaccggattggcggagatgaatttgtgatcttatgtataaatctgaaacggtctcaggtggagcagcgggccagaggtgtgaaaatggctgtggagcggaaggaataccattgctctgtgggatatgagtggcgcggctctcagatcgacatccaccagattgtgaaaaccgcagaggacaggatgcgcaaagacaagcgtgcctattaccagaagcagggaaatatacagggaatcagagaaatgaatcaccagctggagcagatgatcgtggaaaaacaggatgcagatgcctttttgtctgtgatcgcttctaattttaagggggtttattttgtaaatatgtctcaggataccgtgcggcatatttatattccagagtattttgaagctatgctcaagcgttccggggaaaagttcagcagggcaatccgtctgtatggagaagaagaggtacaagaagattattccgaagaatttgaaaaattctgtgaatatgagaagctggaagacaagctgaaccaggataccgtaccggaatgcatctataaaaagaaagacggcacctggctgagcgccagggtgtttaaattccgcaagtacaccagggaaaacaaggaaaccctttggattttccaggaggcggacacggccgcaggaacagatgccatccagaatgccggggatttagacggattccaggcttgacaaaaccagggcaaataggtaaaatgtgtaatagtttcatagagaaaggcgttgaagaggagtagtaggataggaaagcattcagagagccggcggctggtgtgagctggttgtagaactatctgaactggcctttgagcttccgggctgaaaggggagggatccccaggtaaatccggacgggaattcccgttacaggattaatgagtgccccaaagtctgaacggacaggggaattagagtggtaccacggaaagcaggccctttcgtctctaaagctatttagtgacaagggtccttttatcttatttatgacagaacacacaggaggaattcaaacatggctgcaccttataatcataaggcaatcgaagcaaaatggcgtgtaaactgggagaaaaagccggtgaacgtcaatgacggcaaaaagccgaaatactactgtctggatatgtttccatatccctccgggaacggtcttcatgtgggacactggagaggatatgtgatctctgatgtctggagccggtataaaatgctccagggctattatctgatccatcccatgggctgggacgccttcggccttcccgctgagaattatgccattaagatgggggtacaccctgcaaaatccacagcttccaatgtggcaaatattaagaagcaaatcaatgacatcgccgccatctatgactgggatatggaagtaaacaccacggatcctaatttctacaaatggacccagtggatatttgtaaaaatgttcaaggagggtctggcctatgagaaggaattccccatcaactggtgtccttcctgtaaaaccggccttgccaacgaagaggtggtgaacggctgctgtgagcggtgcggagccacagttacaaagaaaaatctccgtcagtggatgctgcgtatcaccaaatatgcagacaggctgttaaatgatctggacaagctggactggccggaaaaggttaagaaaatgcagactgactggatcggaaaatcctacggcgctgaggtggaattcccggtggaaggcagagatgagaagatcaccgtctatacaaccaggccggacacccttcacggagccaccttcatggtgcttgcaccagagcatgcgctggcacagtctctggctgcccaggagacaaaggaggcagtggagaaatatatctacgacgcttccatgaagtccaacgtggaccgtctccaggataaggaaaagaccggtgtcttcaccggcacctatgccatcaatcccctaaacggagccaaggttcccatctggctttctgattatgtactggcagattatggaacaggtgccattatgtgtgttcctgcccatgacgaccgtgactttgaatttgcaaagaaatttgatattcccatcatccaggttatcgcaaaggatggcaaagaaattgaaaatatgacagaggcttataccgaggcatccggaaccatgatcaactccggagagtggaacggtatggaatctgctgttttgaaaaaagaagcacctgaaatgatcgagaaaatgggaatcggacgcaaaactgtgaattacaagctccgtgactgggtattttcccgccagagatactggggcgagcccattcccatcatccattgtccaaaatgcggggcggttcctgttcctgaagaccagcttcccctgacccttcccgaggtggacagctatcagcctaccggcacaggagaatctcccttggcagccattgacgagtgggtgaacaccacctgtccctgctgcggcgcaccagctaagagagagaccaataccatgccccagtgggctggctcttcctggtatttcctgcgctacgtggataataaaaataaccaggagctggtctccaaggaaaaggcagacaaatatctgccggttgacatgtatatcggaggcgtggaacatgcggttcttcatctgctatattcccgtttctatacaaagttcttgtatgacatcggagccattgattttgacgagccctttaaaaagctgttcaatcagggtatgatcaccggaaagaacggtattaagatgagcaagtccaaaggaaatgtagtctccccagatgacctggtgagggattacggctgtgactcccttagaatgtatgagctcttcgtgggcccgccggaactggatgcagagtgggatgacagaggaattgacggtgtgtatcgtttcctgaagcgtttctggaccctggcgtctgacagcattgagaaaaacgtgccggccacaaaggaaatgatcaaggtgcgccaccgcatggtgtatgacataacccagcgtctggagagcttcagcttaaatacagttatctccggattcatggaatataacaacaagctcattgacctggccaagaaagagggcggcgtggacaaagagaccattgagactgccaccattcttctggcaccctttgctcctcaccttgcagaagagctgtgggagctgctgggccatgaggattctgtcttccatgccgtatggccggctcatgacgaggaagccatgaaggatgatgagattgaagtgcctgtgcagatcaacggcaagacaaaggcagttatcagcattcctgctgaggcatccaaggaagaggccattgccaaaggccgggaagccatcgctgacaagctgacaggaaccattgtaaaagaaatctatgttcccaagaagatcattaacatcgtacagaaataattgaaagatttttttaaaccgcacagaccgcagttggcctgtgcggttttttgttacatctgcaggcagctgcatgagaataaaaaccgagaattgtttgaattaattgaaaaacagcccataataggttgtaatttttgcgaatatattttataattaatgaaaatatttgctgtattgggaaaaaacagcagaaagtgaaggaagagggtatgcttcgatacaccgatcatatgagtaatgccagcattgtggggattatccgccgtgcctgcaattgtgtggatgaaaggctcatggaccatggattccgggtttcttttattgtatcccgccttttggaatctcagggcacctataccataaaagaaatgcgggacatctgcctggctgctctcctgcatgatattggagcctataaaacagaggagatcaccaaaatgcttcagtttgagaccagaaatgtaaaggagcattctgtatacagtgagctgtttatccggcatttttcccctttagaggaatatgcgccggcagtcctttaccatcatacagcatggaaggaattggaaggattagaggaggtatctcaaaggcagaagacggcggcccagcttatcagtattgcggacagactggatgtgtatatccgatatgacaggctgaactggaacaagttctgtgaatatttgagaactgtgagaggagagaagttttcctgtgaggtgacggaccttatgctaaagcaggactttatggatctgaccagggaagatctggagacagaggaacgatacaggcatattttgtattccattccttttacccaggaagaggtctccgggtatttggaaatggtgatttttaccattgatttccgcagctatcatactgttacccacacctgtaccaccaccagcctcagctatgagatcggtcggcggatgaatctggaggaggattatctgcaccagattgtgtgcggtgcccttcttcatgatatggggaaaatcggcattccggtggagattctggagtatccggggaagctgggacctcaggctatgaagatcatgcgcacccatgtggatatcacagagaagatcttaggggaccaaatctcccaggtggtgagaaattgtgcccttcgtcatcatgagaagctggacggaagcggctatcccagaggattacgtgagaaggacctttctgtgggggaacggatcgtggcggtggcggatattttaagtgccctgtccggtaccagaagctataaaacagcttatgacagggagcggatcttacatattatggagggcatgtgcagggaccacctcattgatgagaagatcacggcttttataaaacgggattttgatgagatgatgcaggtgacaaaggagcgctgccagcccattgtggaacgttaccagcagatccgcagggagtatgaaaccatgctggggtatgaacccagagaagagaaaccttatgattcttggtaagcaggggaaggggattttacaatggacagtaagaaaactctgaagaacaaaaagaggctgtgctatttcatggttttccttgtggtgaatctgttgacggctgttgttctttcggggagagaaaccatggcggtgcgtgaaagcttaagcagtcacgcccagaatacaaaggtacagttccaagatatcttggaggattaccagcgcacgttccaggtttttgtgcagatgatgggcagagagattgagaacaatcctcagccggaggtgatctgggaatatctccagagcattgacaagactcttctggaaatccagggggaaacctatgatggtttatacatgtactataagggcaggtatctctatagctgggacactccttactcccagtatgaacagacgggatataaggcccaggacaggccctggtataagaaggcagtggctgggaaggggagcgtggtttttacccctccttatatgagttatgcaaaccattatatccttaccaccatttcccagctccagccggatcaagagacggtatttgcctatgatattaaaatgggagatattcaggagctggtggattctatcagtgcatttgagaatgagcagacctttatttttgaccgtgaggggacggtggtgggaagcaccaatacggattatctgggaggaaatctgtatgcccagccagatgaacttgaaaaagccgttgaccagatacataaagagctggatgaggggagcgggagcagccccaaggagcttaagaaaatacaggagagacttcagtgggcagaggcctttcgggatttccgcaagaatttttcagcaggactgccaatgacactggccaaccgggatgaggtcctgtccgtaaagctggatggcaagaaatattatgcctatacctccaaggacggggactatagcttccttatattagtgcctgttttatccatattaaaggatacattaaatatctggctcattccccttcttcttgtggagctgatcttgatctatgtactggggcgtgtgagcaaggaggagaagaaccgggagttaagggaggcatacgtggagctggggcagacccagaagcgcctggagatcgccctgaatgcagcccagaaagcggcagctattgatgatctcacaggaatgatgaattttaagtccttccgcaaggagatgtctggagctttgaaggagatgggagaagaggaaagcggtattttgatcatgatcgatggagaccatttcaagaatgtgaatgacacctacggccacaatgtgggagatgaggtgatcaagctcacagcccagatgatcattggccgaatccggaccgtggatctggcttcccgtctccatggagatgaatttgccatttttgtggcagacactgccgattattccgtggcacagggaatcatgaatgatattaacaaatccattgccaaggaggcggcaaagcggaatatgccttccattaccctgtcggcgggagctgtgacggcccggcggggggacaattatgcggctttgtccaaggcagcggatgaagcattatataaagctaaggaatctcataacggcggttttgccgtgaactgaacgaaaaacctctctggggcatagcggtgtgcctgtacagggaggtttttttgcaactgttgccggacctgcagataaaatgcatgaattgtgaaaaaagtataaaaaatcacccacttatcacttgattaaaggaaaaaagcatggtataattgccacaatgtatggactgcaagtacacatgtctttgcagtaaaaacaacaaggaggattgaattaatgaagagaaaatggttatctgtattaatgacagcagcagtggcagcatctatggtagtcggagcagcagttcccacctttgcagcggacactgtgaaaatcggtgtgtatgagcctgcgtctggagacaacggagcaggcggcaagcaggagacccttggtatccagtatgccaacacggtggctcccactgtggagatcggtggtacagaatataaagtagagctggacattgtagacaatgagtcctccaatgacaagggaccatccgccgcggcttctctggtaagcaacggcgtgtccatggtattgggctcctatggctcaggcgtatccattgccgcttccgacatctttaaggatgctggtgttccggctatgggcgttacctgtacaaatccgcaggtaacccagggaaatacccattacttccgtatctgtttcctggatcctttccagggtaccgtacttgccaacttcgccaatgacaatttccaggccaagaaggcatatgttcttacaaaattaggggatgactattccacaggccttggcttctatttcacgaaagcttttgaagagctgggcggagaagtagtagcggaaaccttcccggatggaaacagtgatttcgcatcttatatcacatctgccaagaatgcagaggcggacgtattcttcgctcctgtgtccacagaagcggcagccctgatcattgagcaggcctcctctcagggaatggagattcccatcatggctggagatacctgggattccaacgtgatcttaaatgcagccaagggcaaaaacgttcaggtctatgtaacgaccttctatcaggaaggcggaaatccggagttcgacgaaggcctgaaggcatacatcaattctgacaacacggcaaaagccaacaatggcggtgacgataccatcgcagctgtgtccgccatgggttatgatgcgtactttgtagctctggaagctcttaaggcagcaggctccacagacccggcagcagtgaacgaagccctctgggatgtaacttatgaaggcgtatgcggcaaggttcagttcgacaaagagaacggagatgctgtaagagacactgcatatgtaaagagtgccaacacagagacaggtgcatgggaattcgtaggagagcagggaattaactaatacagcaaagaagctgaaaagaagaaaatagttggattaggggcgggccagcattgtcccgcctcctaattttgactgtgagggaggatttctatggattggtttggaagaaacctgccttatttgatggcaggtatttcagttggcggtcagtatgcgctgattgccatcggttataccatggtttatggtatattacgcttaataaacttcgcccacggcgatatttttatggtggcaggtctcattatggtctatgcatccgcatccatgcctatgtacctgtccattccccttgttttgatcgcaaccgttgttataggttttttggtagaacgtattgcatataagccactgcgctccgcaccgcgtatgtccatcatgatctcggccatcggtgtgtcttatctgctgcagaatctggcgctgtatgtcacaggcggtcttgctcagcagtatccgtctattccatggatcagcgataccattcaggtatttggtgctaccacaaaacgtgtaacagtgattacgcctattcttaccattgttctggtgatcgcgctggtaatgctgatcaagtataccaagatcggtatggccatgcgggcggcctctaaggattttgagacctcccagctcatgggcattaagatcaattcggttatcagtatgaccttcattatcggctcctttttggctgcagtgggcagtcttctgtttttctccaactacacaggagttactcccacagcaggggcaatgcctggactgaaggctttcgtggcagcggtattcggcgggatcggttccattcccggtgctgtcattggcgcgtttatcattggtatctgtgaaaatattattaagggaatgggatggaccaccttttctgatgcgttcacctttgccctgttgattattattctcattgccaagcctacaggcttatttggcgaaaaagcaacggacaaggtgtaaggaggcgatggtatgacaaagaaaaaagagacgatcatcaacgttgccttgatcgcaggtctgttgatggtattgtacataatggagagggtgcttcctcccacagcgatgatatttacagttttgaaaaaaggcgccatctatgccctggtggcagtgtccatgaacctgctgaacggtttcacaggactgttttccctgggccaggcgggttttatgctcctgggagcctatacctacggggtgctcaccatccctgcggagcagaggatcaatgtgtaccagtattttgacggaggtgtgatccagtttgcggttccggtgatcgtggccctggtggctgcaggtgttgtggcaggtattttcgcttatctcatcggacttccggtgctgcggttaaagagtgactatctggccatcgccacactgggatttgcggagatcatccgtgctgttttccagtgggataagctgggccccatcacaaatggctccaacctgcttagaagctaccccacctttaaaagtgtgatctatccctttgtggtttctggtatctgtatcgccattatcgtgatgctcattaattccacctacggccgtgcctttaaggcaatccgggatgatgaggtggcagcggaggctatgggcatcaacctggccaagcataaaagaatggcctttgtgatcagctcctttttcgcaggtatctccggagcccttctggccatgtaccagaccaccatccaggcatccatgtttaagtcagctatgacctatgagattctcctcattgtggtcattggagggatcggctctgtgacgggaagctgcgtcagctccttcctgttcattatctgttcagaatggctgctgcgtttcctggataatgatacttacatcggaagcttccatgtgcccctccttcgggctggcttccggaaagttgtattttccattattattatgatcattgtgctgttcttccgtaaggggattatgggcaccagagaattttccgtgagagggatttataacttcttaacaggaaaatcacgtaagaaaaaagcagctgagggagggaactccaatgaataatgtgctgaaggtggaaaatatcaccatgcagtttggcggcgtgatcgctgttgacaatatgaacattgaagtaaaccagggggaaatcgtctctctgatcggtcccaacggtgccggcaagaccacggccttcaacgtgatcaccggcgtgtatgcgcccaccaatggggcagtatactttcaggaccagaagattattgagaaccatccccagggaaaaatgaagaaaatgtaccagggagagaacggcggcatgtaccaccatgtgctggctcccacccctgataaaatcaccaagcttggaatcgccaggaccttccagaatatccggctttttaaaagccagacagtatttgagaatatcctcattgccaagcacttaagacgcaccagcaatttatttacagccaccttccatctgaatggaaaggaagaggcacagatgcgcaaagagaccgaggagctgctgactatcttggagctggagaatgtgagggatgagctggccacctcccttccctatggaaaacagcgccgcctggagattgccagagctctggctactaaacccagccttcttctgctggatgagccggcggcaggcatgaacccccaggagacggacgagcttacggcctttatcggcaggatccgggatgattttggactgaccatctttatgatcgagcatcatatggatctggttatggagatttcagacaggatttatgtgttggattttggaaaacccattgcagagggaactccggatgaggttcagaataatccaagggtaattgaagcatatctgggaggtgccgctgatgagtaacatactggaagtgaaaggactgagcgtatcctacggagggatcaaggctgtgaaaaatatcagctttgaagttccccagggtgaggtcgtaacccttataggagccaacggtgcaggaaaaagctccaccctgcgttccattgtagggctggtgaagcctgcggcaggcagcattcttctgaaggggaaagagattgcaggaaagaccccggatcagatcgtcacacagggagtgacgcttgttcctgagggaagaagagtttttgcggacctgacggttctggagaacctgaagatcggagcctatatgagaaatgacagtctggaggaggatctgaactggtgctatgatctgtttccaaggctgaaggagcgccactggcagcttgcgggaacactctctggaggagaacagcagatgctggccatcgcaagagccctcatgagccgtccggagatcattatgatggatgagccttctctgggactggcaccgcttattgtgagaggtgtgtttgatattatccgggagatcaacaagaagggcgtgaccattcttcttgtggagcagaatgcgaacatggctcttcatgcggcccaccacggctatgtgatggagaccggaaacattaccctgtccggcacaggggcagagcttgcggagaatgaatccgtgaaggcagcttatctgggaaaagcgaaaaagtaagacaggtcatccgtttttgtttagaaaatacagcagaggcacaacatccattccgggtcttgtgcctctgcttttactattcttttttaacagctttcagacggatgcttagagcaccttggtggtccacttggagcagtcccacacctgggatacaatgtcctgataaaattccggttcatggcagatgagcagaatggtacccttatactccttcagggcctcctttagagcttcctttgcatccacgtccagatggttggtgggctcgtccagaagaagcacgttggtctccttgtttaccagcttgcacaggcggaccttggcctgttctccgccggagaggacacgcacctggctttcaatatgcttggtggtgagtccgcattttgccagggcggagcgcacctcatactgggtgtaggaggggaattcctgccacaattcttcaatgcaggtggttttgttgtctcccttcacctcttgctcaaagtagccgatctgaaggttttctcccagaaggcagcttccttttaaagcagggaccagccccaggatgctttttagaagggtggtcttgccaatcccgttggctcccaccagggcaaccttatagccccgctccagggaaagggacaggggcttggataagggctcctcatagccgatgaccagatcctttgtctcgaaaatgtattttccgggggtgcggccctgtttaaagtggaattccggcttgggacgttgggcagccagctggatcacatccattttatccagttttttctgacgggacatggccatgttcctggtggccacccgggccttgtttctggccacaaagtccttcagctcggtgatctcctgctgctggcggcggtaggcggcttccatctgggcctttttcacctcatagacctcctgaaaatgttcatagtcccccacataccggttcagctcctggttctccatgtgatagataatgtttaccacttcgttcaagaaggggatgtcgtgggagatgaggataaacgcattttcatattccgtgagataccgcttcagccaggttatgtgttcttcatccagataattggtgggctcgtccagaaggaggatgtctggcttttccaataaaagcttggccagaagtaccttggtcctctgcccgccgcttaaatcggtcacgtccgtgtcaagtcccagatccagaagacccagagctctggacacttcctccaccttggagtcgatcacatagaaatcatggagggtgagggtgtcctggatggtgcccagctcttccataagagcatccatctctttgggggatgcactgcccagcctgtcacagatgtcattcattttctcttccagttcaaaaaggtaggagaaggcggatttcagcacatcccttatggtcatgcctttggtgagtaccgtgtgctggtccaggtatccggcacgaacgttcctggcccattggatttttccttcatcgggcatcaggctgccggtgacaatgttaaaaaaagtagattttccttctccgttggctcccaccaggccgatgtgctctccctttaaaagccggaaggaaacatcctggaaaattgcccggtcgccgaagccgtgggttaaatgttctacatttaaaatactcatggtaataaactcctttatttacaggccctggggccgctgtttttttcctgacaggcaggtgagaatgggcggctgcccttagagggcgccggcttctcactattttatcggaagaggagctgtttgtcaccatgttttttgggaaaatttagttctggaagaaagaatctattcctccatccatctgtggccggttttttctataaattcatcggactgaacgggtccgcgggtgccgggggcataggggtacaccggaagcccctgggcaagatagctttgctttagctgctccatgtaattccagctcagctcgatctgatcccactgggagaaccaggagcgttcactgttgatgcaggccgtaagcagcctttcgtaggcttccggggtgttcagatgatggataaggttgcagttctggcagaaatccattttggccgggatgatgtcatcggtgtcaccggggcgcttaatattaaactgcaggtatacgccctctgtgggctggattttgatgataaggatgtccggttccacgtccggctgggtggtccggaatacgatggatacctccatctgtctcacaccagtcttttttcccgtgcggatgtagaagggggtatccttccatcgggcattgtcaacgtaaaggcgcagccctgcataggtttctgtgacggaatccttctttaccttgggttcgtcccgatagccctcatattggcccaggatcagagagtcttttatggggatatcagccactggacgaaggctggacaggaccttgagctgttgggtgtgcatatgggcgctgctgaaggattccggctgctccatggctacaatggagagaatttgaagaagatggttctggaccatgtcctttaaagcgccgctggcgtcatagtagccgcccctggtctccacgcccacatcctccagggcagagatctgcacggactcaatatacttggagttccaggtatctgtaaagaggggattggcaaagcggatggtgaggatgttgcgcaccatttccttgcccaggtaatggtcaatgcggtatatgttctcctttccgaagtagctttccagctcctggcttaattccctggcagcagtaagattttctccaaagggcttttccagaatgacctttcccttgtgtgcgccagccacagccttcaggccttgggtgatcacgtcgaagaaccggggagccacggcaaaatagaacaaatgggactgaattttatctttggcaaagaagtcgttcagtcgtgcgtagtcttccatattggaaaggtccatgcggaaataaaatagatgctgggagaaggtggcgaagttctcttcctggtaggggagccgggtgaatttctgtatccagtcctttgccgcctgacggtaggaggcggtgtcataatcttttctgccgataatgaggatccggctgttctttggaagcttcccggtggtatccatggtatacagagcagggagaagcttgcggaaggtcagatctcctgttcctccgaatatggtaaggttcagatcaagattcattcttcattcctccaatcatggtgaaagataccttcccggtctgtgcgctggaaggtgtgggctccgaagcagtccctctgggcctggatcagacttgcgccgctggccaaggcccggaattcatccaggtaggacactgcgtttgcgaaggcagggatggggattgcgcccagcacaccagcagacactgtctgacgaaggctgttttgatatttttgaagctgctccaggaaaaattggtcaaagatcagattgtccagggcgggatttttctcgtaggcctttgtgatgtcatttaaaaatactgcctggatgatacagcctgcccggaaaatggaagcgatctttccaaggttcagattccagccatactctctggaagcatgatccatgagagaaaagccctgggcataggcaatgatctttccaacatacagcgcctccttcaccatacgggcgaaggcttctttgtgagaaggctgggctggggctgtgtggggaaggaccttggcggctttggcccgttggtccaggtggttggacattacccgggcgttgcaggcagcggtgatcatggagatatccacgccctgccgcagagattcaatgctggcccagcggccggtgcctttttgtcctgcgctgtctttgatgtagtcaatgagcagtccaggggtcaggtcatccttttctttgaaaatctgggcggtgatcttaatgaggtagctggaaagctctccctcattccactggccaaaggtttgggagatttccaggttggaaaagcctcccaggtattttaaaagaaggcctgcctcggcgatgagctgcatgtctgcatattcaatgccgttgtggaccattttcacatagtggcctgcgccctctgggccgatataggtacagcagggctggcccatggctttggcggaaatggcctccaaaatggggcgcacctgttcatacgcttccatgtccccgccgggcatgatggagggaccgaagcgggcgcccttctcgccaccggagacgcctactcccaggtagtgaaggccggcttctttcagccgcagatagcgcttatgggtatcctggaagtaagaatttcctccgtccaggatcatatcccctggctccaggagggggatgagctggtcaatgacagcgtccacaggtctgcctgcctggatcatgagaaatagttttctgggacgtttcagagaagcagtcaggtcctccagagagtagaaggccttcagattctcgtggggaaagtccttcattacctgttgtgtcacctgggggcttcggttgtagccggccacctggaaaccatggtctgccatatttaaagccaggctgcggcccataacggaaagaccgatcaatgcaatatcaaaagtttgtttcatggtagttgtctcctttcataattgaaaatgtgtgcatctgcaggcattttcctttggtttctatgtgttctatagggagtattcacaattttcattttctaaaacaatgctcactgcctccggggcggaaacctgggagcagggagagccaatcctgccgcttctgggatctatggggaaggatacaaggcctccccgggtgcggttggcggccagtaagaagcgcccgtcaggggtgagaaggatgtctcttgggtgctctccgcagctgtccgtctgttgaaccacagtcaggccctgatcttctaccgaaaagaccgtgagcatgtccgtgaaccgggtggaggtgtacacaaaccgttcatctaaagaaaggcggatggcagcgctggccgggggctggaaagtgctttggctggcagcgtcccttgaggttttttcgggaaccggcaccggcacacaggacagaagtgtaaagtcctttgtatggctgtcagtgtcaaagagaaagagctcattgctcagttcgctaagaaggaggaatttcctatgatttctggtgaaaatcccgtgtcgggggcctgttccctgaggaaaattgagagctcctgcaggggcaaaatcctgactgcagtcatagatcataattttatccaaaagcaggcagggcaccagcaggtagtgtccgtggaaaagaatttgatggcagcctgcgccctcctgtatgacaatccgcttataaagtggaaagtggggactctttttttcatagatgagaatctggccctggtggtaattggcggtatacacataggactcatcctgagtgacaaagcaggcggttttcttctcattatatcgttctgccagcaaggttccgtccttgggggctgtatctatgaaacagattccagcatcctggctgccttgtatgggggagaccaggagatggttctgaagggacaggtatttgcagtccctggcaggataataaagcgccggaggtgtgagctggccggtgtctgtgtctatggtgaagcggtaaatcccctcactgtggggtgaggcgtaggttcccagatatccggttaataggggagatgaagcgtcgagattcatagggccctccttcaaataaaaaatgtaatagaaaatgttacagtttataactgtaattatatgcgttacagattctcttgtcaatagtaagttctggtttttccgaaaatagggggaaggtgaggcggtataaaaagaaaaatatacagtgaaatgtataaaaaccaaaaaacttgtataaaattgcaggaaatggtaacatatgttacggaatgtaaaaaagaaaggtgctataatgattcatcatcagaaacagcaccttgcctgcagcaacgcagggaggatgtcactgtttatttctgtacatctggaagggcgctgccggccatggcatatagtaacggaaaggtgaggcagagatgattgattttcttaaaaccattgatttatttgcagatatggacacaaaggacattgaatacttattaaaatgctccggggctgtatgtaagaattatggaaagggccaggtggttttccaggaaaaccaggtgccggagtacatctacgtgcttctggagggaaagctgctcatgtccaagcatttttcatctggacgccggattattttctgtgagattcatgaaaaagaggtgttcggcattttgatccatgtgcagcccaacgagaattactggtatgacgcccttgcggtcacagactgtaaggttctggcaatttcctgggagtttctctttggcatctgccctatttcctgtgaggtacataagacctttattaaaaatatgatccgggtgcaggcggatatcagcgtatcccagatgaagaagctgaacattctctccggagttaccgtggaggccaagcttgggcttttgatgctggagctgatggatggagagggaaatgtggattttaaaatgaaccgggaggagctggcggattttttggggatcacccggccgtctctgtccaggtccctgatgaatatgaaggagcggggaatcctccaggtgaaccgctcccatgtgaaaattctggatttaaatgagttggagaaaatctgtattcactgagaaacggagaatttctatgaggctaatgataatcaatcctgattgggggatgaccagggaacagatggattaccggtgccgggtactgtcccagtatgtggccggggacgtggagctttccatggcatgcctcactgacacaagggtccagctggactctgtggcggacggtgtatttgcaggccctgagattgtgaaaatggctgtgcaggcacaggaggagggctatgacggtatcatcctgtactgcttcagtgacccggctttggaggcctgcagacaggtggtttccatacctgtcatcggcggcggccaggcagcctgcctgacactgccctgtgtgggatatcacggcgccattttagtggcccagaaggagaggattcctgagaaaatgtggtccctgtccagaaccggactatccatggaacggattgtggggtatgaagccgctgacaccagtggtctggatccagagacggaccatgaccggatgctggagtctcttacccaggcaggcagaagggtccttcaaaggaccggagcccaggtgctggtgctggggtgtctgtcctttttggggatggcgggagagctggagcgggcactgcaggttccagtgatcgaaccaggggcggcggctgtatccatggcggagagcctggtgaggcagaggcttttttccagcgaaaaagcttatttaaacaggaaggcagtttcctgtaccgtgtaggtgataaaaaagaaactataaaaaagagaatcatttaaggaggagaaacttatgaagaaattaacagcacttttattgaccaccgctatgacagcttccatgctggcagcgcctgccgttgtacaggccaaggaagagaaggatacctgggtggtggccatcaacgcaaccttcccaccctttgaatccgtggcagacgacggtgaggattatgtggggattgacattgacattgccaactatctggctgagaaaatgggcgtgaagctggagatcaatgatatgcagttttccgcactggtatccaccctgcagagcggacgggcagactggatcatctccggtatctcccccacccaggagcgtctggatgtgctggattttaccgattcctattactatcccatgaatgccatcatctgtgcgcagggagacagctacgataccttggatgcgcttaaggacaagaaaatcggcgtttccatgggaaccagctacgcaggcattgcccagactgtggatggggcagaagtggctgagctggacagcactccccttgtgatccaggagattttaagcggacgctgtgacgcaggtattttcgatgccacccaggcggctgtgtttgtgcaggagaatgagggattggaaatgcacattattgaaagtgagatcaccagagaggattcctttgccatcgcccttcccaaaggctctgaatatgtggaggagatcaacggatatctccaggagatgatggaggatggaaccttccatgacattcttgtaaagtacattggcgaggactccactgcacagtatgaggagatgctggaaactctggatgcggccaaagaagaataaaccacggacaagctgtatttagggaccaaaagggaacggaggaactttcatgcttgatttttccatacttatcaattatcttcccaggctgggaacagcagtgctccttaccctggaatttacaatattgtcaaccatcttcggctttttgctggggatcgtgctgtccctgatcaagatttccaaggtgaagatcctgcggggatttgcagatgtgtacacctctattttccggggcacgcctctgctggtgcagctgatgctggtgtactttgccactccccagcttctgaattatcagatctcagcccttcaggcaggcgtgctcaccttcagcctgaacagtgccgcctatatttcagagtccatccggggagggatcctctctgtggagaaggggcagtgggaagccgccctgtccctgggtgttcccagaagacggcttatggttaatattatatttccccaggcatttaaatacaccctgccttcgctcattaacgagagcattgccttgctgaaggattccagtatggtgtccatcatcggcgtggcagataccatgcgctgggccagcctgatccaggccaagaccttccgggcttttgaggcctttatcatcgcggccctggtatattatgtgctggttatggcactgacttctctgggcaaatatctggaaaggagagtgcgtgtcagtgattaaaattgaacatctcagcaaatcctttggggagctggaggttttaaaggatgtgtctatggagatcggcaagggcgaggtggtggccatcttaggcccttccggatctggaaaatccactctcctgcggtgtatcaacctgctggagcagcccacagggggctgtattaccattgacgggaaaaacattctggagccccaggtggacattgcggatatccggaaaaatgtgtgtatggtcttccagcattttaatttgtttcacaatatgacagtccttcgaaacatgacctatgcccccatggtggtgaacaagctgaacaaaaaggacgcagaggccaaggccatggctctgctggagcgggtgggcctggcagataaggcccatgaatatcccagccgtctgtcaggaggacagaagcagagagtggccattgccagggcccttgccatggaaccggaggcgctgctctttgatgagcccacctcggccctggacccggagatggtgaaggaggttctggatgtgatcaaggatttgacagacacagggatcaccatggccattgtcacccatgaaatgggctttgccagagaagtggcggacagaatctgttttttggacggaggttatctgctggaggatgcttctccggaggaatttttcagcagtccaaagaccgagagggcaaggcagtttttagacaaaatcttataaaatatctggatgaggaagacaatgagagatacgaaaacctttgaacagttaaaatggcctggcggcgcgaaatgcgccgtcatgttaagttttgatgtggatggagacaccatctggaaaaacggcgccagaggtattcccggcggggaggaatttctccgggccaactctgtgggagactatggtcccaattgtgcagtgagaagaattgtggagattctggaacggcatcaggttcctgccactttttttgtgcctgccaaggtgatggaggatcacccggacctgtttgtggagcttcacagaaagggctttgagatcggccaccacgggtaccaccatgagcgctatgtggacttaagcccacaggagcagagacagatcattgagaaaagccagaggatctttcagtccgtgatcggggtggaggccacaggctaccgcactccctctggagactggtccagggagacggcggcaattttatatgacatgggtttttcctattccagctccatgcggggagatgacagaccctaccgcacggtcattgatggaaagatgacggattttatcgagatggcccccaagtgggacctggatgattttgtccagttcggatacaatctgtaccctgcagaaccttccggccaggaccggatcgccgggattgagcaggtgtatgagaacttctgtcaggaatttgacggctattacagggaaggcctgtgctttgtcatccagtgccatcctcagatcatcggctccccgggcaggcttctcatgtatgagcggctgatccgccatatgaaagaaaaagagggagtctggttcgctgccggctctgagattgccgcctggtggcggcagaattattgacgggggtgaggacatgaagaagatgaatgcagtattcactgtgaacctggacgctgagagcttctggcagggaatgtttgaggggacgcagaagcgtcccaaaaccctctccatgggggattacggaatcaaaagaggactggaccgggtgctggcggtttttgaagaccatgagatcaaggggaccttctttgtacccggggtgatcgcccagaatcatccccaggccattgaaaaaatcctgaagggcggccatgagatcgcgtttcacggccatacccaccgtcctatgcatctgctctccaaagaagagatccaggaggagtttcaaaagggaacacagatcctgacacagattgcgggacagcgccccaagggctttcgggccccggagggagaggtgacccgggaggcctttttggccgcctgcgcccatggctatgaatattccagctcactgtacgaccgggatatgccctatgaaagtcattgggaccagggaagcctggtggagattcccatgaactggaaccttcatgattttccctattttgcctttaactatggcccggcatttcccataggacagagccgggtatcctcctaccggcgggtggaggaaaattatatagaggagatggacgcctatcttcactatgggcttacctatgtggctcagtttacccctcagtccattggttccccgggaaaaatccagatcctggagcatatcctggagcacctggaggggatccgggaccagatgtgcgtccttacctgcagggagctggcagaagcgttctacagccagaattcttgagggctttctcagaggaagggtatgtgtgtgggcatctgtctgaaaaaaggtcttttcatttatagagaacaggtataaaatatctctaaatacatggcctgcctatcaaaagaaagaacttaggcggcaaaagaaaaggagagagaattgtggagacaaaagtgacaagagaagaggccctgaagcttctgaaaaaatacaaccaggagccctttcatattctgcacgcccttacagtggaaggcgtgatgggatggtatgcaaaggaagcaggggaggatgagcatttctggtccatggtgggtctgcttcacgatgtggattttgaaaaatatccccaggaacactgcaagaaggctccagagctgctggcacagatccaggcagagccggagcttgtccatgccattgtatgtcatggatacggaatctgcagtgacgtgaagccggaacatgagctggagaaggtgctgttcgcctccgatgagctcacagggctgatcggagcggcagccaggatgcgtccctccaagagcgtgatggacatggaggtgtccagcctgaagaagaaatttaaggacaaacgctttgcggcaggctgctcccgggatgtgatcaaggaaggtgcagagcttcttggctgggatttaaacgagctttttgaaaagaccattgcggctatgcgctcctgtgaagagagaatcaaccaggagatggaagagctggcctgattttgaagatggaagagctggcctgtacatggaacatggaagccgtaaaagagatcatggatagaaaaaagtgcgctgcccaaaagagggtgcgcactttttcggcttatactagaatttcatacacgcccagcagaaccatcagcaggtctgcgaagggttctgcgtattggttgaccttttggggaaggcgggaaaagcccagccggttccctaaataaaaaaagagcatggaaaagcacagggaaaacaaggcggtaagggtcacaggaaggccggtgaccccggcgccgatacccagccccatgttattgatgcaaagggcaaagcctaccagaaatacttccctgtaatttaaggcggtggcggacagatccttggtttcttttttgcgggaatttctcctcaagtattggatcaggcctgcaaggcccatgaaaacaatgagcaggcctcctgctgttcctgacaccttcttgggaagcagaaaaagggcgcctctgcccagaagcatggagcccaaggttccggcaaagcagatgaaccccaccaaaagattctgaaaccaggagacagaagctttttttattccataggaaagtccaaccacaaagctgtccacatttgctgaaatgccgaacagaatggatgacaatacatgcagctgcatagaaatttcacctttcactggaaaaattaaatatcgaagaatattatcgtatcaataattaatatatttctaagtgaaggatttggttccagcggtgtggcacaggcagctatggaatgaaaagcagccgctattcagacagcagcttcagtccggtgatatctggggaagccatgagcgaatagttggtatagtagaccacaaagcctggcttggagccgtttggctttttaacatgttttttctgaatatagtcaatctccaccttgggggcagtgcggcctttggaatagtaggcggccagccttcccgcttcttcaaatacccggtccggcacctcttcgtcctttgttttcaccaccacgtgggagccagccattttcttggcatggaaccaccagtcatttcctgtggcagatttaaaggtaagttcatcattctgataattgttttttcccacataaatatcatagccatcgctggagacataatggaagggtctggattttgcctggggtttctttttccctgcgtaatgccggcggatgtatccatattccgtcaattcttctttgatctgggccaggtcgctttctgccagggcaatatccagggcgttgctgatggattccagatgctcgatctcactttctgtgtccgcgatctgctgggtgagagcctcctgggtgcgcttcagcttcccataccggtcaaagtatttcttggcattctcctggggagtgagggtgggatccaggggaatggtgatgtcttcatttgtataatagttaaaggcagagaaggatttggcaccctcctcaaggccgtagccgtaggtgttgatcaactcaccatagaccttgtacttatcttttttctccgtatccttcatctgtttttcctggatgagatatttctttcggtttctatccagagcggtctgtacgatcctgcgcagatccgaggatttctgccggatgcgggtgattgcattcttggtggcatagtaagcctccagaagggaggacacatcctcaaagctgcggctggtatactgggagccgaactgctggagaggaagtacagcgtactccacaggctccccgtcccggtagataatgtttggggtaaatgcaccattttgcacatcctccataagccgcaggaaggtgtggtacagatggacactggcagtctgcgacagggaatcggtagaatcccctccgtccagggaggcacggaagcagatttcctcggccataagggggcttaagccggtgagactctggtacagggccttggaaatgttcatgggttttttgcacaccacctgaaggaactcttcctgggtcactgtaaaggggtccagcttttcctgggtcttgggaataaagtattcccggccggggagcacctcccgcacagagctcatatgagaggacacgtgcttgatgctgtccaggatcatgttcttgtcgtcacagaagatgatattgctgtgtttgcccatgagctccaggatgagctgctttttgcaggggtctcccatttcattaagatgctccagctcaaagacgatcacccgctccagcccaggctggtaaattctggaaatgcgggctgtgccgatgtgcttgcgcagaagcatacagaagttgggggcggtcaatgggctttgtttgtttttttctgtaaaatagatgaggggcagggaggcgctggctgacataagaagcctgcgggtgtttccctgggccttggcagtgatgagaagctcgtctgcctccggctgggcgattttatagaaacggccgccctccagatttttatttaattcctgaaccatcccatagatggtaattccgtcaaaagccatgtaaattctcctttttttgaatctgcctcttattataatcaaagggagacactctggcaagtgaggattggatataaaaaatgatttgacggaggttttagaatgaactataataaatctgtatgctaaatcataagtaaagagagacaaatccaatgataaaaagtatgacaggctttggcagagcagaggccgtgtccagcctaaggaaaatcacggtggaattaaaatctgtcaatcaccggtatctggatctgaatatcaagatgcctaagaaattaagttttttcgaggtttccatccggaaccttctgaaaaattacattcaccggggcaaggtagatatctttatcacctatgaggactacactgccggccgggttacattgaaatacaaccgggatctggccaaggagtatttgggctatttaaaggatatggaagaggaatttggcctggagaacgacatacgcgtcagtacattgtcccgttaccctgagatttttaccatggaagaacagtctgtggatgaggaggagctgtggacatctctggaggctgtgctcatagaggcctgcgagaaattcgtggccaccagggaggcagaaggagagcatctgaaaatagaccttctggacaaattaaaaggactggacgagaaggtgaatcaggttcaggcccgttccccggagatggtcgctgcctacagagagaagctggaggccaagaccagggagcttctggaggatactcagatggaggacagccggatagccgccgaggtggtcatctatgcggataagatctgcaatgacgaagagacggtacgccttcacagccatattaagggaatggccagggcgctggaggaaggcagggacgtgggcaggaagctggattttatggcccaggaaatgaaccgggaggccaataccattttaagcaagtccaatgacctggagatctccaatattgccattgagctgaagacggagattgagaagatccgtgaacagatacagaatattgaataatagaaaaagaggcaggatttgtggcaaaattaatcaatgcgggatttggaaatatgatcaatgctgacaaaatcgtggctgtggtaaacccggatgcggctcctgtgaagagaatggtccagaactgcaaggggaccagcagcctcatcgacgccactcaggggcgcaggaccaagtccgtcatcattaccgaggatgaccatctggtattgtcagcgctgcagcctgagaccattgccaggagagtatccggcatgtatgatttggaaggaaaggaagaatgtcatgagtagaggtgttttagctgtggtatccggcttttccggagcgggcaagggcacattgatgaaggcgctgctggaagagtatgacaattatgctctgtccatttctgccaccaccagagctccccggccgggagaagaggatgggaaggcatattttttcaagacaagggaagaatttgaagagctgatccgcagggatgcactgattgagtatgcctcttatgtgggcaattattacggaactcccagagcctatgtggaggagcagctccaggccgggaaggatgtgatcctggagatagagattcagggcgctatgaaggtgaaggaaaagaatccagatgctgtgcttgtgtttgtcactgcccccagcggggaagaattaaaaaaacggctggtgggaagaggaaccgaaacccaggaggtaattttctccaggctgtgccgtgcacaggaggaagcccggggaatggagaactatgactatctcctggtgaatgacagcctacaggaatgcgtggaaaaaatgcaccacattatccaaagcgaacatttccggatgaaccggaatatggactttatatcagaaatcaaagaagatttaagacagttacagaaaggagaacacacattatgatccatccatcttattcagaattgatcaaagccatcaacaaaaccgacgaggaggacgagcagctggtagtaaacagccgttattctctggtgctggccaccagcaagcgggccagacagatcattgcaggctcagagccgttagtggagggcgccgcaggcaaaaagcctctgtccgttgccattgatgagctgtataaaggtaaggtaaaaattctcgtggatgacacagaggaagaggaagcagagtaaaaaggagagttcagcctggcattgggccaggctggttctactttatcctttcagttaggagtacatacatattatgaaggttttgtttatatccctgggctgcgacaagaatctggtagattcagaggaaatgttgggcctgttgacgaaagccggccatgagatggtggatgatgagacacaagcagagatcattgttgtaaatacctgctgcttcattggcgatgccaaagaagaaagtgtgaataccattctggaaatggcagaatataaaaaagaaggaaatctgaaggtacttctggtgaccggatgcctggcccaaaggtatcagaaagagattatagaagaaattccccaggtggacggggtgctgggaaccacctcctatgcagatatcctgacagccattgataaggccctggagggccggcatttccaggagtacagaagcatcgatgagcttcctgtggtggaggagaagcggatcctcaccacaggaggccattatggctatctgaagattgcagagggctgtgataagcactgtacctactgcatcattcccaagcttcggggaagataccgcagtgtgcccatggagcggctgctgaaacaggcagaggatatggcagcccagggggtgaaggagctgatcctggtggcccaggagaccactctgtacggtgcagacctgtatggagagaaatcccttcaccttttgctggagaagctgtgtgagatcccggggatccgctggatccgggttttgtactgctatccagaggaaatctatccaaagatggtggaggtaatggcaagagagaagaaaatctgtcattatctggaccttcccattcagcatgccaacaatgagattttgaagaggatggggcggcgcaccaccaaggaagaactgattcagatcatagacatgctccgcagccagattcctgatattgtcctgcgcaccacattgatcacagggtttccaggagagaccagggagcagcatgaggagcttatagagtttgtggaccagatggaattcgaccggctgggagtttttacctactcccccgaagaggatacgcccgcagcttccatggcagggcagataccggatgaggtgaaggaggagcgccagggtgagatcatggagctgcagcaggaaatttccctggaaaaaggccagagccgcataggccaggaaatgttggtcatgatagagggcaaggtggcagatgaaaatgcctacatcggcagaacctatgcagatgcgcccaaggtggacggctacctgttcgttcagacagaggaactgctggtgaccggagattttgcccgtgtccgggtgactggagctttagaatacgatttgataggagagttggcccatgaatttaccgaataaattgaccatattgcgtatgattttagtacccttctttgttgtttttattctcacaggctggggaggagaggccaaccgctggatttgtgcggctttgtttgtggttgccagttttacggattatctggacggtaagattgccagaaagcataatctggtgacgaattttggaaagtttatggatccactggcagataagctgctggtatgctcagccctgatctgctttattgagctggacaagcttccggcgtgggttgtgatcattatcattgccagagaatttatcatcagcggcttccgtctggtagctgcagagaacggagtggtcattgccgccaactactgggggaaatttaagactgtggcccagatggtcatgaccgtcttgctcatcttaaacctgggcggatatttccaggtgcttgagcagattttcatctggctgtccctggctctcacggtcatctccctgatcacctacattgcacagaacaggcaggtcctgtccatgcagaattagcatggggaaaggaacaatatgacagcagaatttatctctgttggaacagagattttattggggaacattgtaaataccaacagcgcatttttggcggaaaagtgtgcccttctgggcctgtccgtgtattatcagaccgttgtgggagataacgaggaacgtctgtaccagacagtgaagactgcagtggaccgctccgatgtggtgatcctcaccggaggcctgggacccacacaggatgatatcaccaaggaagtggcagccagggttttccagatggagctgcaggaggattctcacagcctcaggcgtattgagaaatatctaaatgaatatgaaaagaacaatcctcagagaaagatcacgcccaacaactggaaacaggctatggtgccaaagggagccattgttttagacaatgacaatgggactgccccgggactgatcctggagaaggaaggaaagacagcaatccttctgccggggccgccaaacgaaatgtgtcccatgtttatggaaaaggttttcccctatctccgtgaaaaacagccggaaatgatcttctcacagatgatcaagatctgcggcattggcgaaagccaggtggctgatgagattcaggacctgatccaggcacagacaaaccccaccatcgccccatacgccaaaaccggggaggtgcacctgcgggtgacagccaagggagaagacgaaaaggaatgcaaaaagctgattaagccagtggtccgggagctaaagagccgctttggaaaaaatatttttgccacagatgaaaataagacgctggaggaagctgtggtagacatgctccgggaccagaagctcaccctgtccctggcggaatcctgcacgggaggggagatcgctgccaggatcgtaaatgttcccggcgcctcggaggtatttaccaatggctttgtcacctacagcaacaaggccaagagaaaattcctgggtgtgaagaaggctaccctgaagctgtgcggagcggtctctgccagatgtgccaaggagatggcaaagggaggctgcctctttgcaggctctgatatctgcctgtctgtcaccgggctggcaggcccgggcggaggaacccaggagattccggtgggtaccgtgttcatggggtgctgctacaatggaaaaaccatagtaaatgagtatcacttctcaggcaaccgggacaagataagggagcaggccgccgcccatgccctgtctcttcttagggaatgcatgatggaggggatcgaaaaacactagaaccagaaataattaaggaccatgggtacaggagacagctcctggaccacatggtcctttggcataagacaggaaattccttgggagatacacacaatgtgccaaggaaagctgtttggcagctgcacattggcggggacctgcccctccgtcagcgcagcatacgcatcatctgtatcatctggtccagtttggcggcctcctggggggatttacccattttcagcacctcgatgatggtggagatttcattttcattgaaattcagtcctccctctttaccctttgaggcagcggccatgaggaagggcagaagctctgcagggcttttttgttttccctggtctgccagactctgcagcatatccagtttacttttatccatattgttcagtttgggattatttttccaatcctggttctggttcatagaattctcctttctggttctggtctgtgctctggaacaactgaagcatctgtaccatcaccatcatatgaatgaggctgtccattttagtacctgcttctccgctgcagtagggacggatttcctggatgaattccaggggagaggagggggccggggcagcttcacagatgctcatattctggacaccctggggaaaaagtgtgaaggtgttcaatagttccgaaaattttgtatacacagacaacatacgctggccagacggaggcaggtagggcagagcagctttgagaatttgaagctgctccgtgctcacaagacggtccagcgcagtctgaggatgcagatcctgatccatggcgattcctccgatgatcaaacatgtttccaaggttattatatgaccgccggggctgtcctgacatatgctaatggtatgaaaagaaaggaaggaaccttatggacagggatgagactaaaaaagaaaggctggtcattgagggcaatgccttttatgagatagatctggaatgtatggagagaaagaaaaaagccagggaggagatggagcggaaaaaaggacgaagaaatgggcaggggaattgaccccctgcccgttttcctgctaggtatttttgcttagcatccgcagccgtttccgccaaaaccgccgcacagaagaagaatcaggatgataagacagcagttgtcattgccgcatccgttaccgcatccgttaccgaatccgttgctgccgcagcaggacataaggataagaacccacaggatacagctgcaggaattattgccaaatccagacaatccatttccgcatccacatccgttatcacatccacatctttcctcacatccacatccacagtttgtagcagctaaatcactcatgttcttaagtcctccaaatttagattacactccatcatatgaagcaggggggaaagtggtgaatgattttggaaaatagttgacagtaaatttttaatcagctataattgcaatatggttttgtaacacttttgtaaaattcgacacgaattcgacacaaaatgaaaagaagatttaaagtgagggtgtttttatgactgagacaaggcaagggtggaaacacagaagctgcattttaatgctggccatgttttcaattgtgggatttctgctgcttggcatgccaaaggaagtacatgctgcaaaaaaaggttttgtgacacagggaacaaatacatactatgtagatgaggacggaagccggcataaggggtttcttaccttaaacggcgcaaaatactattttgaccccaaaactacttatatgctcaaaggctggcagtataacagcaagggcgagaaaatacgttatttcaacaaaactactggcaagatgctggaagggtattccagaaacgcccaggggaaagtgagatatttccggagaggcagcggccttctcatgcatggctacgctaccaattccgcaggaaaggtacagtattttaactcaggtgagggtttccgccagaccggatggatggagacagacggccagctaagatattttgacgcgaagaccggctatatgaagaccggatgggtgaattctgggaccaagaagcggtatttccagccccagaggccgaaggagggcatgggagactatggtgctctgtgtacaggccttatgcgtatcggcggctactattattatttcacccctgccaaaacgcttaatgatatccgcaatggcggcggagtcatggtgaacagcggtttcactgaggtcaatgggaagatgtattatttccagtccaatggaagggccaagatcggatggctcactttagacaagaagcagtattattttaatgccaaaggacagatgtaccgcaatacccagcaggtagtcagcggaaaaacctatacctttaattccagcggcgaggctacccatgttccggtcactacgaacccagacggaaccttatcctacacagaatatggggtaaagatgacgctgtacggtgcctattcacagattccgggcatagccaatggcacagtttccgacgagacggtcctggctgccattgctgaccgggaggcaggaaaccagggactttatgggatgataggtgtgtgtatggtggtgctgaaccgcactttggacaaaaatacctccttcccctctgatttcaggaaagtgattttccagaaggggcagtttaatgaaactgcagagggaagctttgccctgtttgagaagcgtatcaagggcacaggctggcactctgaggcagttgccagacaggcagccaaacaggctctgaatattttcgacaggtacaagttgaatggcacggccagaaggatcagtaattataagaccaaggattttgattatctgttttttatgacccctgcatcctttgccgtctgcgggattaataccagcaaggtaaaatgggagcagtataaggaccatgtgttctttgacaaatggttgtagaaattttatatagggatttagagaagagtcttaaaaggactcttcttttttttttaaaaccctccggaagtgagaagaaatatctggattctacggtaggcaaacgtcagaggttgtggtataataagcggcagattttgcagaaagaggtgacagagttgaacccatacattcaaatgcttctgtttatgatgggagctgtgattttgttgatcgttctcatgatcaggaataaccagcggcagaaggcggtgatgctcaacatgttccgccgccgtttcggggaggtgccggacagggaatatcattccggagagattgagagaatttctcattactacaggagaaagccgggagaggggttttccgttgatgatattacttggaacgacctggacatggacagcatttatatgctcatgaaccagactgtatcctctcctggtgaggattacctctactacattctccgaactccctgcttttccaacgaggagctgaaagagagggacaggctcattgatttttttctcacacacaatgaggagagggagaaactgcagctcttactggctaaggtgggtaaaaatcgtttcggttccctgtcagatacgatctttgccctggaaagtgcaccagtgattcctctaagaagtcatattatcatgctggctcttattgtggcctccatcgctgtgattccttttgcccctgcgtgggggttcttggtgcttgtttccttatcgatctcaaatttcggttactattttgcaggtaagaataaaaaggatattgatatatatatgtcctgttttgaaagcctgacccggatcctcaatgctgcggatgagatggagacggtggattggcccattgtggctaagcagatggagaacattaagaagggaaagcgtgcgtttcgttctttccggaaaaaagcggtatggattgcgggaaaggatgagatcaccagcaataatcttgtatatattatcatggactatgtgcggatgctcactcacgtggattttcttatgtttaaccgggtggtgaaggaggttcaggggaagcagaaggagatttttcttctcatagacaatattggagagctggatgccatgatctccattgcctcttaccggaagctgctgtctattttctgcaagccggaattgtcaacgtatgaggaagggcaggcagtgatgaatgcagaagatgtctaccatcctctgatcactgagccggtggcaaacaccattctggccaggggaggcacattggtcacagggtctaatgcctcaggaaagtccaccttcttgaagatcgtggccatcaacgcaatcttggcccagacggtatatacctgcacctgcaccagataccaggcgccctttcttaaggtgatgacctccatggccctgcgggatgacctgttcggcggggagagctattttatcgtggagattaagtccttaaagaggatcctggatgagagcaggaaggaagaaccgctgctgtgcatcattgacgaggtcctgcgtgggaccaacaccattgagaggatcgcggcatcggccagaatcttaaaggagctggcccagccctgggtactgcctttcgcagccacccatgacattgagctgtcctatatcctggaagaaatttacactaattaccatttcgaggaagaaattaagggaaaagatgtgctgttcaactatctccttcataaagggcgggccatgagcagaaatgccatcaagcttttggaggtgtgcggatacgaccagcaggtggtcacccaggccagagaggcggcgctgcattttgaggagaccaatgaatgggaaataatcaaaggagtgtgaagagatgttggtgaaaatttatacagacggagcagccagaggaaatccggacggaccggggggctatggcacagtccttcactttacagattccacaggaaagcttcatacaagagaattcagccaggggtatgtgaaaaccaccaataaccgcatggagcttatggctgccattgtggggctggaggccctcacccgcccctgccaggtggaactgtattcggattctaagtatctggtggatgcttttaaccagcactggattgacagctggctaaagaagggctggaagcggggaaaaaatgagccggtaaagaatgtggacctgtggaagcgcctgttaaaggcaaaagaccctcatcaagtgacctttcactgggtgaagggccatgacggccatgaggagaatgagcgctgcgactatctggcaacttcggcggcagacggggatgagctcattcctgacccgggagtgtgaccccaaacgggtttctccatcaagggtgactgtgctgctgtaaattgataaagacaccccgaaaacgtcttgacaaaaaaagggacagtttgtatacttaccagtagttcataatcgaaaggctgggaagggaaccagtagcagaaggaaagcgtacagagagctgccggagggtgagaggcgcacgtggaacttttgtgaatacatcctggagctttgcacccaacagctctgtctgaaaaaggtctggcagaggtaagtaggctgcagcggaggggcgcacgttacagcgctgaagtgatggatgtcacttgctaagacagaggatgcgagtcttctgtgaatttaggtggtaacacgggacccggttctcgtcctaaacggacaggaaccgggctttctttatatgacagaaattttctgtacaattagaaaacaaaaaatggaggaaacgaatatgacagtatgggaagaactcactgccagaggcctgatcgcccaggtgacagacgaagaagaaattaaggaattggtgaacaatggaaaagcaaccttttatatcggctttgaccccactgcggacagccttcatgtgggacattttatggccctgtgtctgatgaagaggctgcagatggccggaaataagccgatcgctcttattggcggcgggaccggatatataggcgatccctctggcagaagcgatatgcgctccatgatgacgccggagcagattcagcacaactgtgactgctttaaggagcagatgagccgttttattgactttggagagggaaaggccctgatggtgaacaatgcagactggctgctgcccttgaattatattgacctgcttcgggaagtgggctctcatttttctgttaaccgtatgctcacggcagaatgctataagcagcgtatggagaagggcttgtccttcctggaatttaactacatgatcatgcagagctatgacttctatatgctgtaccagaaatacggctgtcagatgcagttcggcggggatgaccagtggagcaacatgctgggaggcacagagctcatccgccggaaattaggcaaggatgcctatgccatgaccatcaccctgctcctgaactcagaaggaaagaagatgggcaagacccagtcaggcgctgtatggctggatcccaacaagacctcaccctttgacttttatcagtactggagaaatgtgggagatgcagatgtgatgaaatgtatgcgtctgctcaccttcctgcctttggagcagattgaagagatggacaagtgggagggaagccagctgaaccaggcaaaagagattctggcttatcatctcactgagctggttcatggggaagaggaagctaagaaggcccaggagggtgcaagagcactttttgccgctggagctaatacagagaatatgccaaccacagagctttccaaggaggattttcaggaggggtccattgacctgatcaccctgctggtgagatctgggcttgtgccaagccgttctgagggacgccgggccattgaacagggtggtgtgtctgttgacggagagaagatcacagacattaaatacacagtggagatggagcgttttcagggagaaggcctggttcttaagcgtggcaagaaaaaattcaataaaatttgcgtgaacgaataagttgtgctatgatgtaaattaatgcaaaaaagtacaagctgcttaggaggaaagaactttgaaaaaatatggagtaaatgagcttcgccagatgttcctggattttatggagagcaagggacacctggttatgaaaagtttttccctggtaccccagggagacaagagtcttctgctgatcaacgcagggatggcaccgctgaagccatactttaccggggctgagatccccccaaggaaacgtgtggctacctgtcagaaatgtatccgtaccggcgacattgaaaatgtgggaaagacagcccgccacggtaccttttttgaaatgctgggtaatttctcatttggagattattttaaaagtgaagccctgaaatggtcctgggaatttctcacagaggttgtgggacttgaccctgaccgtctgtatccctccatctatctggacgatgaagaggcttttgaaatctggaataaagagattggaattcctgcagagagaattttccgttttggcaaggaagacaacttctgggagcacggagccggcccctgcggtccctgctctgaggtttattatgacaggggagagaaatatggctgcggcaaagagggctgtaccgtaggctgtgactgtgaccggtatatggaagtctggaacgatgtgttcacccagtttgaaaatgacggggagggcaattatacagagctgagccagaaaaatatcgacaccggcatgggcctggagcggctggctgtggtagttcaggaagtggattctatttttgacgtggataccatctgttctctgagaaatctggtgtgtgagattgctcaaaaggaatatggcaaggtgtacgatcatgacgtctccatccgtctcatcacagaccatatccgttccgccacctttatgatctccgacggcatcatgcccaccaatgaaggcagaggttatgtgctgcgccgtctcatccgccgggcagcccgtcacggacgtcttctgggcatccagggaaccttcctggcaaagttaagtgaagaggtcatcaaaggctccaaagacggttatccggagctggaggagaagaaggactttatcttcaaggtactcaccaatgaagagaaccagtttaataaaaccattgaccagggtctgaagattctggcagagatggaagaggacatgaaggcagcaggccagaataccctgtccggggacaatgcttttaagctctatgatacttatggctttcctctggacctgaccaaggagattttggaggaaaaaggctacgggatcgatgaggacggctttaaagcagccatggaggagcagcgtaccaaggccagaaaggcccgggaggttaccaactacatgggagctgacgccaccgtctatgatcagatcgatccggctgtgacctcagaattcgtgggttatgaccatctgacccaagagtccaaggttactgtgcttaccacagagaaagagctggtaaacgacttgacagaaggccaggagggaactatttttgtggagaagactcccttctatgccactatgggcggacaggccggagataccggtgtgatcagagctcagaacggtgtgttccaggtggaggataccattaagctgcgcgggggcaaattcggccatgtgggccacatggtctccggaatgatctctgtgggcgagtgtgttgctttggaggtgaacagccaggcgagaaagaatacagagaagaaccacagtgccacccaccttcttcagaaagcattaaagaccgttctgggagcccacgtggagcagaagggctctctggtgactccagaacgtctgcgctttgattttgctcatttccaggcgatgacccctcaggagatttccaaggtggagactttggtaaatgagaagattcaggagtctctggatgtggtgacaaatatcatggatcttgaggaggcaaaaaagagtggagccatggctctgttcggtgaaaaatatgaccagaaggtgcgtgtggtatccatgggcggcttttccaaggagctgtgcggcggtacccatgtatccaatactggttccattatgttgttcaagatcctctctgagtccgggatcgccgcaggtgtacgccgtattgaggctctcactggcaacgcggtgctggaatattataagaaacaggaagaaaaacttcaggaggcagcaagggccctgaaggtgaatccttccgaactgccagataagatcgcacatcttcagaatgaactgaaggctgttcacagcgaaaatgaatccctcaagagcaagctggctcagggagcccttggagatgtaatgagccaggtggtggaagtgaaaggcgtgaagcttctggctgccaaagtagagggcgtggacatgaacggactgcgtgatctgggagatcagttaaaggataagctgggtgagggcgtggtggtcctggcagctgttaacggggagaaggtaaaccttcttgccatggcaaccgaggaagctatgaaaaaaggcgcccacgcagggaatctgatcaaagccacagccgctgttgtaggcggaggcggaggcggacgtcccaacatggcccaggcaggcggtaagaatccggctaaggttcaggaggccattgacggggcagcggccatcctggaaggacagctgaaataggacccggttcgccggggttcaaaatttctgtaaaaaaaatgcagaaatcgcctaaaaccagttgacgaaatagaagaatctgatatataatatcatatgtgcaagaaaaatacccagacagttgtatttaagcacaatctacaactggagggaggttaggtgtgagtctatgtcaaatgtaatcgtaaaagagaatgagactttagatagcgctcttcgcagattcaagagaagctgtgctaaagcaggaattcagcaggaaatccgcaagagagagcattacgagaaaccaagcgttcgtcgtaaaaagaaatctgaagccgcaagaaaacgtaaatataactaattgtgcgcaaaaaatccctgtcaatcggcagggattttttaaagcagaaatcttggataaaacttgaatagaggaagagtttttcaagggaaacgtatgaaaaggaaaaagaatgaagataattgaagggctaatgaagcctttgaacaagatgataaagctgctgttcaaccggatcttctatgtagtgttggcactgctgatccagctggggtggattttgatttttgtgtggaggctgaatgagtattcaaaggtaatttccatcagcatgtcggtccttacttttttggctgtgctgtttattgtaaataaaaatatcaatccttcctataagctggcatggaccattgtgatcctggtgatccctattttcggtcttgtgttttatctgctgtttggaaagtccagagtggctgcagccatggaggagcaattggaaagggtccagaagaacacggtgccttacctccaggaatcacagatcaccagggcccgcttaaaggaaatggatccctctatttccaaccagtcggaatacattaccagatattccggctatcctctccaggagaataccgtggcggaatattttacggtgggagatgatatgtttcctgtgtttatacgggagctgaaccaggcgcagcattttattttcattgagtattttattatcaatgacggggtcatgtggcagaccattctggatattctggagtccaaagttgcacagggagtggacgtgcggctgatctatgacgatttcggctgtctcaccacccttccctataagtaccagaatttcttaaagtccaaaggcattaagtgtgcggtgtttaaccggtttatgccctttttgaatattatccagaacaaccgtgaccatagaaaaatctgtgtcattgacggccatacaggctttactggagggatcaatctggcagatgagtatattaaccagagactccggtttggccactggaaggatacggcggtaatgctcaagggagatgcggtgtggaattttacagccatgtttcttcatatgtgggcagttgtgaacaatgagaagatgacagacatccagaaatatctgccccatgccaatcacccccaggcctttgagagtgacggctttgtgcaaccctactgtgatacgcctttggatgatgagatcgtgggagagaatgtttatctgaatatcattaacagggcgaaggaatatgtatatatctgcaccccttatctgatcattgacaatgagatgatgacagctttgtgtctggcctctaaaagcggggtggatgtgcgtattatgacaccgggagtgccggacaagaaaatggtctttcttctcacccagtcttattaccgtcagcttctggaggcaggagtgaagatttacgaataccagcccggctttctccatgctaaatcctttgtcagtgacgaccaggtggcagtggtggggaccatcaatatggattaccgcagcctgtacctgcattttgaggatggggtatggatgtgccagaataaggctgtgatggagattaaggcagactttacggagacactggagttctgcgaggaaattactattgagttctgtaaaaagagaaatatttttgtacgagccacccagagtgtgatgcgcctgtttgcccctatgctgtagtacgggggagatacattgaaaacaggatgtttcagaaaagaaactgacaggagccggttattcccttgccgctgtcccctggctgacagcttccacgaaaagaggctgtctggccctgggtgagcagtgggcggaagggaataatcggttttttggcatatttgaagtctctttggcgtttaatagtaatagaatccataatttggggagagtgtcaagtgaaaaagagagttcgagtatggctgtgcacagggatcagcctgctgctggctttcggcccagccttacaggcatgggcgcaggaagagcagacgtggcaggaagaacaggcgggattggaagaacaggcggaattggaagagcagaccggacaggaggaacagacagaacaggcagaccagacgtggcaggaagtgcagacggcccaggagcagccaggtgaggaaccggggggtgaaggtggcacgggagatgggcaggacagtctcattcaggcaccggccggaatccttatggaggccagtaccggtacggttgtatatgaaaaggatggggacaccaggcgcagccctgccagtatcacaaagatcatgaccttgatcctgatttttgactgtctccagaatggcagcctacatatggaggataaggtcaccaccagtgcctatgccaaatccatgggcggctcccaggtatttttggaggagggggagcagcagaccgtggagaccctgatcaaatgtattgtcatagcctctggaaatgatgccagtgtggccatggcggagcacatctgcggaagcgagcaggagtttgtaaagcacatgaatgagcgggcacagggcctgggaatgaccaacacgaattttgaggactgctgcggccttacagaatccaccaaccactatacttgtgccagggatattgccattatgagccgggagctgatcaccaaataccccaagatcctggaatattcttcaatctggatggataccattacccatgtgaccagacagggaagcagtgaattcggcctgacaaacaccaataagctgatccgcagctatgagggctgcgtaggacttaagacaggcagcaccagtctggccaagtactgtctgtcggcagtggccagcagaaacggagtcactttaatctccgtgatcatggcggccccggactataaagcacgttttacagatgcctcggcacttttgaactacggcttttccaaatgcagtctttacgaagatgagaaccaggagtcccttccccggctcccagtaaagaaggggaaggaaaaggatgtgggctgcgtctttgcaggacctttccgctatttgaacacggagggaaaggccgtggagggtgtagagaagtccattgagcttccagaaaccttgacggcgcccatagagaagggggcccctgtgggcaaggcagtgtacaaaatgaacggccaggttctgggggaggtggcccttctggcccaggaggaggtaaaggaggcagtgttcctggattatctcagggaggcggccaggagaatcttttgacaaaaaaaacggcgtctatgccacactttgtaaggcagggtcgtagaagatcttggctcacaaagagagcagagaactgctctggaaataccataaggaaagaaggacaggattatgatacaggagatagctccttataaattttacaatgagtacaggccggcgccccccaggccccaggattacattttggcctatggaccgggatctgtatttttaaaggagggtgaggagatcacctatcttacctggcaggaggtgagagagaaggagccggagagggaaggggagctggtctatttatttgccattgatgacctgcgtttttatctggcggcagagctgaagctggagctgtaccagggatatgtcttggctcctctgcgcagcctgcgcacactgggaccgggccatctcacctttgcaggggttaccggccatcagctggccgcctggtatgagaaccggagatactgcggacgatgcggccatcccatgagaaaagataccaaggagcgtatggtcttttgtgagagctgcggaagccgggaatatcccaaaatctgtcctgcagtgatcgtggggatccgcaaaggagacagccttcttctgtcaaaatatgaaggccgggactacaagcgctatgcccttattgcaggatttgcggaaatcggggagtccattgaagacactgtgcgcagggaggtcatggaagaggtgggactgaaggtgaagaacatcaccttctaccgaagccagccctggtcctttacggacaccctgctgctgggtttttactgtgacctggagggctcggatcagatcaccctggacacagaggagctggcccttgcccagtggtgcacaagggaggaaattcccgatgaaggagagagcatcagccttaccaaggaaatgatgatgcggtttaaacagggactggacagggtcccatatgaagaatagacaaaaatcaaagcgggcaggccccttatgggagagggacttgcccgctttgcgcgccaatgtgcagcttcgaagcagctttccttggcacattgcgtgcatccgcccggagagtctttggttttcacagattaaacacattttcaacaccttctgcccacactttttttgtaagcttggataagaatttttttggagaaaggagtgggaatatggaaatgggaaactatcgtcatgagtatagataccagctcaatgctgtggattatgaaatccttaaaagccgtctgccccatgtgatgagccgtgacagccacacagacagaaacggaaaatacagggtccgcagcatctattttgatacgccccaggataaaattctctggggcaggggaaatggtgtctctcagggagagaaattccgccttcgctattacaatgaggacatcttccatatccgtctggagaaaaaaagcagatacaaggacctgtatcaaaagacagaggctcttctcacctatgaagagtgcaccaagatcctttcaggaaatgtgaactggatgttaaaggactcccgcaggcttctggcagagttctatggaaaaatgaaaaccctgggacttcggccaaggaccatgagctgctatgaaagagaaccctttgaatatcctgtggggaatgtgcggatcaccctggattcagaaatacgcacaggtatccagagcagggattttcttcacatggagtgtgttcccatggtgtgcagcgccggcaagagattatatcttatggaggtaaagtatgacgccttcctgcctgaccatatccgttccataatacagcctggctgctacagggcggggacttattgtaaatatgccctgagccgcagctttggttaaagacagaacacaaatgcaaggaggttaatatgacttttcaagaaattttcaaattagattttctagataaagcgggaagcgtttccattgtggaaacagccattgccctggttctctcctttgtggtggggctgtttatcttctgggtatacaaaaagacctttcagggcgtgctgtattcctcggccttcggtctttccctgactgccatgaccatgatcaccacctatgtgatcctggctgtggcttccaatgtgatcctggcccttggtatggtgggagccttatcccttgtaggatcccggtcccttttgagggagcccatggaaattgtctgcctgttttgggccgtgggggctggaatcgtgctgggggcggggatgctgccgctggcactgctgggaagtgcgtttatcggtgttattctgctgcttttttccaaccagaagaggaaagaccggccgtatcttctggtggtcagttacaacagtgatcaggttgaaaacagcattctgcaggtagtccaggagtcctcgaagaaatatatcgtgaaatccaaaagcgtgtctcctcagggcgtggagaccaccattgaagtgcgtattcctggaatggacacgcagtttgttaaccgtgtggcggctatcccggaggtgaatcaggcagttttggtaaactacaacggagaatattcaggataacagactcagtgagagcccatggaatgactgctttacaaaaaaacatggtatgatataatgattaggagattcttcagaaaaggaagcatctcctttttgataatcgaaagaaggattctcccgccttttgggcgcaaagaggcatcccccaacgtaagagaaggagaagcagtttcgaaaaacagaagcaaaagataggctgctgtctggcagagacagcacacagggaggtttatacaatgaaagaaatcagaacagaagatgctgcagggcatattctttgtcacgatatcacccagatcatcaaagatgagaagaaaggtgttcttttccccaagggacacattgtcagagaagaggatatcccagcccttttatcagtgggaaaggagcatttgtttgtgtgggaaaaacaggagggaatcctccatgaaaatgaaggggctgccattttgtatgaaatgtgtgcaggccctcacatgcatggtacgcaggtaaaggaaggaaaaatcgagctggtggcagacatggacggcctgttgaagatacgccgggatgccctgtatcaggtgaacagccagggagagatgatgatcgcctgccgccacggcgattttcctgtgaaaaaaggagataagattgcagggaccaggatcatccctctggtgatcgagaaggagaaaatggatcaggcaagacaggccgcaggcccggaacccattttttccatccttccctaccagaagaaaaaggtaggcattgtcaccacaggaagtgaagtaaaaaaaggcctgatccaggatgccttcactccggttctggaagcgaagctggccgaatatcccacagaggtcatgggccagacccttccgggagatgacaaggagcagatcaccagggacattctggaatttattgaacaaggcgcccagcttgtgatctgcagcggagggatgagtgtggatccagacgaccgcactccgggagccatcaaggatacaggggctcagatcatcacttacggcgctccggttctgccgggagccatgctgttggcggcctactataagggggtgcccatattgggccttccaggctgtgtgatgtatgcgaaacgaaccatctttgatctggttctgcccaggatcatggctgatgatcccattaccagagaagacattgattcactgggagaaggaggcctctgcctgaactgcagtccctgtaccttccccaattgtggatttggaaaataaaggagttctatggagaaattttatctggagaagtatacgtatccatgtgaaacaataaaaaaggacacaggggctgtgcgctttcatgtgatcagcgaccttcatggcgtggagattggtccagacaaccggctgctcctgaaacgcatccggtcccgcaggccggacgcggtgctcattccgggagacctgattgtgcgccagcaggagaggtccatgcatcatgcgctggtttttctggaggagctggtgaagatctgtccggttttctattccccggggaaccatgagacgaaaatggagcagtctctggagggacaggatatctacggctggtatgaagaacaggcaagagcttttggggctgtggtcttgaaaaatcagaagacctttctatgtgtgagggggagcagctttatttttcacggactggagctggagaacgaatattacaaaaagcccttctccccctctttatccagggagcatatggacgaattgctgggaaggccgtgggagcagggctgtcacattcttttggcccacaatcccaaatatggagatgcttattttaaatggggagcggatctgacagtgagcggccattaccatggaggcgttatccgttttacccagcgccggggggcgatatcccctcagcttcagccctttccctcctactgctgcggggattttagaaaaggaaaacagagaatggtggtcagcgccggattgggagagcacagcgtacctctgcgcatccacaatcccagagttttagtagaaattaatctgataccccttgaaaaaaatggatttattcagtacaatacaaaatcgaaagcttagggaaaaagaggatactacatggcgattccagtaaaattaccggtttttgaagggccgctggaccttctccttcatcttatcgacaaaaataaaatcgacatctatgacatccccattgtggagatcacagaccaatatatggagtatatccggcagatggaccaggaggacttagggatcatgagtgagttcatggtcatggcagccacccttatagacattaaatgccgcatgcttcttccaaaggaagtcaatgaggacggagaagaggaagacccaagggcagagctggtgcagaagctgttggagtacaagatgtataaatatatgtcctatgagctgaaggaccggatggaggacgcccagaatgtgttttataaaaagccaaccattcccaaggaggtcctctcctatgaggtgccggtggaaccccgggagctgctggctgacatgaccctggaacggctccatattattttcaaatccattgtgcgccggcaggaggataagctggatcccatccgaagcaaatttggaaagatcgagaaggaagaggtcagcctttccgataaaatgaattatgtgaaaagctatgcaaagacccacgaaaggttcagcttccgggaactgctggaacggcagtgcagtaaggtgcaggtcattgtcacctttctgtccatcctggagcttatgaaaatgggcaacatctgcatcagtcagaaagacttgtttgacgatatccagatccaagtgacccaggacccggatcactggggaaatttgctggaaattgaagagtagaggagaatggagcaaagcgtggaactgaagaaactggaaggggccgtggaggcgattttattcaccatgggagaagctgtggagctgggaaaaattgccaaggctctggagctggacaacaaaactgcagaaaaactcattcggaatatgaaggacaggtatgagcaggaggaacggggaatccagatcatagagatcaatgattcttatcagatgtgcaccaagaaagaatactatgattatctcatccgcattgccatgcagcctaagaaggcctctcttacggatgtaatgctggaaacactctccatcattgcctataagcagccggtgacaaaggctgagattgagaagattcggggagtcaaatgcgaccatgcggtgaacaagcttattgaatacaatctggtgacagagctgggcaggctggatgcacctggaaggcccatccttttggggaccacggaggagtttctccggtgcttcggagtccacaacctggaggatctgccagaaatggatccggtgcgcctggaagattttaaggcagaggcggagaaggaagtacagttggagctggatatttaagaaagaaggaggaaggttatgcctaccacatttacacatgacctgttcggcaaagaggtgtaccgcaagcttccccaggagatgaaggagctgctgcgggagcatggtggtctgtaccgcattggacttcatgggccggacatattattctatttcagaatttataaaaataaagtgaatcaatttggtgtgaaaatgcaccatgaaaaggcgagagccttttttgaacaggggatcgagactgtgagaaaggataaggatgacgcccttcttgcatatcttctgggatttgcctgccattacattctggattccactacccacccggtggtgaaccggatcgcagaggaagacggccccagccatacccttcaggaaaaggagctggacagatttctcatgcagcgggaggagaaggatccccacacgtattatcctgcggactgcatccatccgaaaaaggcctatgctctggagattcataaagccatacccctgatccctccaaagaagatataccagtccctggtgatgatgaagtggaccaccggaaagatggtatttgatgacaatggaagacgccagcagattctgcttcccttgtttactctggcaggacagaagaagactctgggcgatcattttatgcgcaaggatccccccaggggtatccgggtatatctggaggagcttctgcaatgttacgaaaatgcgctgtcagaggccccggctgtgctgaaggagctgtacgcttgtggaaaaagtccaaaggagcttcccatcccggaccgttttaacaaaacctataatggaaagacaaaatagactctctgcacaaagacagggcttagaaattgatcagccgtaatgggggccgatggtggatattctccgccgtctgcccccattagtcttactgtcccttattcatttacatgattcaatccctggcttaaaatggtggacacatggtcatctgccagagagtagaatacggtcttgccttccctgcgggattttaccaggcggaactgcttaagtatccgcaactggtgagaaattgcactctgggtcatggaaagcacatctgcaatgtcacacacacacagctcctgggcggataaggtatacaggatccggatcctggttggatctccgaaaaccttaaacagatcagccaggctctgcatggtgtccgggtccggcacttcatttttcagtacgattttgtgctggtgatgttcttcacacacctctaatggcaccgttatctgctttttgttcattcgtctcacctcattcttatcatacacgaaaactgcctcctgtgcaaattgaatatgggcaaaaattcccggcctcgaatctgatggaagggcttttcctgtggggcctgttctgggggtgaccgtgtcgtggtccccctgataaggtatcatattttggaccagggagcatatagtataaatatctgctgccttctgtgcctgccatagaacagacggagcaaggcaggatttggagaatgcaaggggaggctgacattgtgaaaataaagagaacagtccgaagagttcttgctttctggatggtgatctgctgtgtttttgccggggaaaccgtgagcggggaggacacccagacggcacagggcccgggaactttgtatgccctgtctgcagttcttatggacgcagatacaggaagagtcctgtacggcaaggaccaggacacggccagggccatggccagcaccacgaaagtgatgacctgtattctggctctggaacatgccaacggagtggatgaggtggtgatctccgaccaggcggtgctccagcctgagatcaagatgaaagtaaaaaaaggagagcgctatcacatggaggaccttctctatgctatgatgctcaaaagctacaatgatgtggctgtggctgtggcagagcatatcgcaggttctgtgaaggaatttgcaaaaatgatgaacgccaaggccaaggccatcgggtgccagaatacccattttgtcaccccaaacggcctggacgctatggacgatgagggcaataagcatatgaccactgccacagacctggccttgatcatgcgctatgccattcagaatcccacctttctggcaatcactcagacaagagagtattccttctgggatatggaccggaccagaaacttttctgtacaaaacgccaatgcctatctgaatatgagagagggcatgatctctggcaagacgggctttactggaaatgcagggtattgctatgtgggagcatatgagaacaaaggccggacctatattgtgtccctcctgggctgcggctggcctaataacaaaacctataaatggaaggatatggatacgctcttaaaatatggcacagaggccttccactaccaaaccttctggcaggatacagagcttgggagcgtatcagtgaaaaacgggatcccccccagccaggatcttcaggaagtgtgcatgattccgttggtgctccaggcacaggagcaggagaggaaccggaagatcctgctaaaagcagatgaacatgtggaaatgtcaaaaaaaatcaaagaagggatcaccgctcctgtgaaagaggggcagaagctgggggaaatcatttattctctcaatggaaagcctgtggctgtgtacaacattgtggcaggagcctctgtgcagcctctgactttccagtggtgtactgaacgaatattccgtaaattttttcatgattaagaaagagaggtgcaaaaacacctcttttttctttgtctgtacaaaataagacggaggttttaaagaaaacatacaaaaatatttagggatacaaaataaaattcaggttaaaaatttaacagaatcctgcgaaatgtattgaaaaaagacggaaaagaagttacaattatacttggctaaaattttggttatgcttttaaattcttataaaaatggagggcaaaaaagaatgagtaacacaacaagcttagcaggcacaagaatcgattctttgcttgacgagaacagttttgtggaaatcggaaaaagtgtaacagccagaagtaccgatttcaacatgactgagaaaaaagcaccttctgacggtgtaatcaccggttacggtgttatcgacggaaaccctgtgtatgtatacagccaggatgtatctgtattaaacggaaccatcggcgaaatgcatgcaaagaagatttccaacctttatgatctggccatgaagacaggagctccggtgatcggtcttgtagactgtgcaggaatccgtcttcaggaagcaacggatgcacttcatgcattcggagagatctacatgaagcagacattggcttccggtgtgattccccagatcacagcaatcttcggaacctgcggcggcggtctggccatgttcccgactcttacggactttacatttatggaagagaagaagggaaaattatttgtatgcgcaccaaatgccctggagggcaacgaggtatccaaatgtgatactgcagcggcatccttccagagtgaggagaccggcctggtggacgtggtggcaggacaggacgaactgatcggcaagatcagagctcttgtatccatgcttccttctaacaatgaggacgatgcatcttatgaagagtgtaccgatgatctgaaccgtgtatgcgaaaatctggagaactgtgcaggagatactgctctggcattgaatcagatcgcagacaacaatgatttctttgaagtaaaaggaaattacggcaaggatatggttactggcttcctgagactgaatggcatgactgtaggggccgttgccaacagaacagagatctatgatgaggaaggcaagaaggcagagagctttgacggcaccatttcttccagaggcgctagaaaggcagcagattttgtgaaattctgtgatgcattctccattccggtacttactcttacaaacaccacaggatttaaggccaccatctgtaatgagaagcttatggcaaaatccgtgggtgaaatgatctatgcctttgcaaacgcaactgtaccaaaggtgaacgtgatcgtgggcaaggcttacggcaatgcctatgtggctatgaacagcaaagccatcggtgcggatcttgtgtatgcctggccaaaggctgagatcggcatgatggacgcatctctggccgccaagatcatgtatgcgggttctgatgcccagactctgaaagagaaagcaaacgagtatgcagcgcttcagtccagcgtagaatctgctgctgcaagaggatatgtggatacagtgattgaagctgccgatacaagaaaatatgttatagcagcctttgaaatgctgttcaccaaaagagaagaacgtccagacaaaaaacatggaacagtttaagtgaggtggcgcatatgaagcagagattaaaaaagattctgagcgtgtgcatggtatccttctgtctgatctctttaacagcctgcggctctgccaaagacaacggtaaggagatcgaggattccgttaaggaagctctggttaccacagcggagggacttacggacgccattgtacctctctcagatgatgatattgaaaatttcaaaaaatccgcagactcttttacagcaggggccattgaggcctgggacactgccagggaagagctgggtgaactgaaagaaaaaggtgagactacagttgcttatgcagatgattcctatacagtaaccgtaccaggaaccttcgagaaggctgatgcgaattttgtatatatgtttgaggaggcaacgggagctcccgaatctctttctgtagatgttcagtaccccttatccgtgactctggaaagagctggtttaaatactgtgatgggactgggcactgtatttattatgctgattttcttaagctttgtaatttacctgatgggcaaagcctgctcaggtatccagaagaagtttgaggaaaaagataaggctgttcctgcacctgtagcagccgctcccgctcctgccccccttgtggaggaagcagaggaagcagatgacacggagcttgtggcagtaatcgcagcagccattgcagccgccgagggaaccagcccggatggctttgttgtacgttctgtacgcaaaattaatcgtagaaaatggtaaatcagagaattcaggaggaatgttagaatgaaaagctatacaattaccgtaaatggaactgcatatgaagtaactgtagaggaaaccggaagcgtatccgcacccgcagccgctccaagagctgcagctgccccaaaagcagcacctaaggccgcaccggccgctccaaaagctgcagcaggcgcaggcgccgtaaaagtaaacgcatctgtacctggtaaagttgttaaggttgttgcagccgccggacaggcgatcaaggcaggcgatactgttgtaattctggaatccatgaaaatggaaattccagttgttgctccccaggatggaaccatcgcaagcatcgatgtagcagaaggcgctgcagtagaaaatggggatactctggcaacaatgaactaagattggaggtagacaaatgtcttatgtagctgatacattgtccaacctgattcatcagaccgcattcttcaatctgacctggggtaattacctgatgattttggtggcgtgtgtgttcttataccttgctataaagcatggatttgaaccgctgctcctggttcccattgcctttggtatgctgcttgttaatatctatccggatattatgctgcgggttgaagattctgcaaatggagtcggtggacttttacattatttctatttactggatgagtggagtattcttccctcactgatttttatgggtgttggtgctatgacagacttcggtcccctcattgccaatcccaaaagcttcctgcttggagctgcagcacagctgggcatttacatggcttacttccttgcgatctttatgggattcaacggaaaagcagcagcagccatctccattatcggaggagctgacggacctacgtccatcttcctggcaggtaaattagggcagaccgcccttatgggtcccattgcggtggcggcatattcctatatgtccctggtgcccattatccagccgcccatcatgaaactgtttacaacggaaaaagagagaaagatcaagatggagcagcttcgtcctgtttccaaattggaaaaaatcttattccccatcgtgatcacaattgttgtatgcttgattcttcccaccacagcacccctggttggtatgctgatgctgggtaacctgttcagagagagcggcgtggtgaaacagctttcagagactgcatccaatgccctgatgtacatcgtagttatccttctgggcacctctgtaggcgcatccaccagtgcggaagccttcctgaacatgaatactctgaaaattgttgcattaggtctgatcgcttttgcctttggtacttttggtggtgtcatgtttggcaaactgatgtgcaagctttcaggaggcaagatcaatccgctgatcggttctgccggtgtatcggcggttccaatggcagcccgtgtatcccagaaggtgggtgcggaggcagatcctaccaacttccttctgatgcatgccatgggacccaacgtggcaggcgttatcggtactgctgtggcagccggtacttttatggcaatctttggtgtataaagaaaaggagaagataaaatggcagaattagaaaaaaaacctgttaaaatattggaaacaattctgcgagatgctcatcagtccctgatcgcgacacgtatgagcactgagcagatgcttcccatcgtagataagatggacaaagtgggataccatgcagtggagtgctggggaggcgccacctttgacgcatccctgcgtttccttcatgaagatccatgggacagactccgtaagttccgtgacggatttaaaaacacaaagctgcagatgctgttccgcggccagaacattctgggataccgtccctatgcagatgacgtggtagaatatttcgtacagaaatctgcagccaacggaattgatattatccgtatttttgactgcctcaacgacctgcgcaatctgaggacagcagtgaaggctgccaacaaagagaacgctcatgcacaggttgccctgtcctatactctgggagatgcttataccctggaatactggacaaatatggcaaggcaggtagaagagatgggggccaactccatctgtatcaaggatatggccggccttctgcttccctacaaagcaactgagctggtgaaggcgctgaaggaaaccgttaagatccccattgatcttcatacccattatacctcaggtgtggcatccatgacctatatgaaagccgttgaggcaggcgttgacatcattgataccgctatgtctccctttgcactgggtacctcccagccggccactgaggttatggtagagaccttcaagggtaccccctatgataccggatttgaccagaatctgctggcagagattgccgactacttccgtcctatccgtgatcaggctctggacagcggtcttcttaatcctaagaacctgggtgttaacattaagactctgctgtatcaggtacctggcggcatgctctccaacctgacatcacagctgaaagaacagcacgcagaggataaattctatgatgtgcttgaggaagttccccgtgttcgtaaagacctgggtgagccccctctggttactccctcttctcagatcgtgggtacacaggctgtattcaacgttcttatgggcgagagatacaaaatggtcacaaaagagaccaaggatgtacttcttggaaaatacggctcaactgtaaaaccgttcaatccggaagttcagaagaagtgtatcggggatgcagagccgatcacctgccgtcctgcagacctgctggataacgagctttccacactggagagcgagatggcacagtacaaagagcaggatgaggacgtattgtcctatgcgctgttcccacaggttgcaacagacttcttcaaataccgccaggctcagaaaaccggcgtggatgaaaaagctgccgacaccaagaatggagcatatcctgtataagactggatattaggctgccaggcagagtgtaaaagctaaggtgcatggcacggcggatgcgttcatccgtttttcatgaaagggctgttgcgtgtgcggcagtcctttcacgttttcaaaggaggatcttcgatgagattaagacaattattgccgctgggtattctggcagtggccctggcgtccggctgcggtctcagccagtcaggcacacaggaaagccagccccaggagtctgagggcccgcaggatacccagcaggaacaggaagtgccccaggagacgcagatacctccggaaatccaggcaccggacgaatcccactcacaggaggacggacagcagggaaatgcaggtccggcggatatgggcaatcaatccctgatcgcccttgccaatgaatgtgtgggcaaggatgtgtctgccctgtatgaagcctgtggagaacccaatgatagttcctatgaggaggatcctgtgagcaaggctacggtggggtatctgttttatgacgactttaccgtttccactaccctggatgaggctggaaatgagacagtaagcggcgtgtggtgatgaaaagagaagaagggttatgaaaaagaaagagattttaaagtccgtaatggcatcagatgccaggaagatcaaggccacctgggaaagtctggataccgaggcctttgatctggcggtgaggaccatccggagggccagaaaccggtacattatcggactgggaaactgcgccccccttgcgtcctatctgtccgcccagcttcatttggtctttgacaatgtgcgccttctcactctggacagtgccagagggctcatcggacagcttctctatgtgggggagagggatgtggttattgccattgactttcccagctacagtatgggaaccgtgaaggccgtggaatttgccggccagagaaatgccaagattatcacagttacagatgatgtgctggctccagtgaatctgtatgctgcctgcaagcttacggcagcctgtgacaaaacggccatagcagactctctggtggcgcctatgagtctgctgaatatgctggtggtatctgcatccatgaaccgccgcaagcaggttgtgtccaccctggagtccttggagagcatttaccaggattaccatctggaaatcctgccgggagaggagcccttggaagaaatccagataagcggattgggcaaagaagaaattgaaaaacggctgaaagccatgaagggtgagaaaaatgagtaaggcagcagttgttggaggcggagcggcaggcatgctggcagcggtatatgcggcccgggccggacatgaagtgcatgtgctggagaagaatgaaaagcttggaaagaagctgtatattacaggaaagggccgctgcaatgtaaccaatgcctgtgacatggaagagctgtttgaaggagttatgaccaatcctaagttcttatacagtgccttttactcctataccaatcaggatgtgatggagttctttgaacaggcaggggttcccttgaaaattgaaagagggggcagggtttttccaaaatccgaccattcctcagacattatcaaggccctggaaaacgaaatgaaaaaagcaggcgtccaggtatttctttctacagaagtggagaaaatccttgtagaggacggaagagtcacaggtgtgtccctgagggatggaaaagaatggaagtatgaccaggtgatcgtggcaacgggagggttatcctacccgggcaccggctccacaggggacggactccgctttgccacagagctgggacttcaggtgaaggaatgtaccccttctttagtacccctgaccgccaaggaggactatatcccaaagcttcaggggctctccctgaaaaacacgggcctttccatttatgagggaaagaaaaagatctatgaggattttggggaaatgctgttcacccactttggcgtcactggccccatgatcctgtcagccagcgctcacattgggaaaaaactggaaaaaggccctctctttgccttcctggacttaaaacctgccctttccagagaacagctggacgcaagaatcctcagagaatttgaggatgggaagaacaagcagtttaaaaatgtgatcggggtgctgtttccctcctctttgacacctgtgatgctggagctgggacaaattcctccggagaaaaaaatccatgacatttccagggaggagcgcttggcctttgtagagctgatcaaggcctttccctttaccatcacgggtatgggaagctttaaggaagccattatcacccggggcggcgtttctgtgaaagaaatacagcctgggaccatggaatcaaaaaaagtaaaaaacctgtattttatcggagaggtactggatctggacgcagtgacaggaggctttaaccttcagatcgcctggtccacggcctatctggccgctcaggctctggggcagaatccgtaaatgcaggaaaaggagagaacgatgattgcaaatattgccattgacggtccggcaggggctggaaaaagtaccatagccagaagggtggccaaggctctgtcctttatctatgtggacacaggagctatgtacagggccatggccctgtacctgctgcgaaaaaatgtccgggcggatgacggggaaggactggcccgggcctgccgggatgcccggatttccattgcctacgaaggcggggaacagaaagttctgctggacggggaggacgtgacagcccttcttcgcagcgaggaggtgggcaaaatggcctcagccagcagcgccaatccaatggtgagagagaaactggtggagcttcagaaggagatggcacgtgtgaacagtgttgttatggacggcagggatatcggaacggtggtgctgccccaggcggatgtgaaaatctatcttacggccagttccttaaccagagcggcccgccgttatcaggagctcattcaaaaaggagaaccggcctgtctggaagatatccaaaaggatatccagcagagagattaccaggatatgcaccgggaatgctctcccctgcgccaggccaaggatgctgtgctggtggactcgtccaatctgaccatagaggaggtcacggacgtgatcctgggaatctataaggagaaaacaggaaattcatggaaataaaggtggcaaaaagtgccgggttctgttttggcgtccagcgggcagtggataaggtctacgagcttgcagaaagccggagctgtcccatttataccctggggcctattatacacaatgaagaagtggtggctgacctggagaaaaagggcgttaagcccatcgcgctccaggaactggatgatatcccaaggaacagcgtggtggtcatccgctcccatggtgtgggacgtgaggtataccggcttttggaagaaaaaaatctggagtatgtggatgtgacctgtccctttgttctgaagatccaccggatcgtggaacgggagagcgaagcgggctcctcggtgatcatcatcggtgattccagtcatccggaggtgcaggggatctgcggctggtgtgagggaacctacagggttctggccacaaaagaggaggcccaaacctaccagtttgaggccggaaagaatgtctgtatcgtatcccagacgacatttaattacaacaaatttaaagatttagttgaaattcttcaaaaaaagagttatgataataatgttttaaatattttaaatattttaaacacgatttgtaatgctaccgaacaacggcagaaagaagcaaaagccatagccggaggggtagacactatgttggtcataggcggccggcatagttccaatactcaaaagctgtttgaaatatgcaaaaatgaatgtggaaatacttactatatacaaacacctgttgacttggattctgctatgttccaatccagtagttgcgtaggtattacagcaggggcgtccaccccaaagaaaattattgaggaggttcaaaaacatgtcagaattaagttttgaacagatgctggaagattccgtaaagactatcagaaatggagaaatcgtgcagggtactgtcatcgatgtgaaggaagatgagatcattctgaacatcggctataaagcagatggtattatcacaaagaatgagtataccaatgatgcaagcgttgtactggcagatgttgtacaccctggcgaccccatggaagccaaagttctgaaggtcaatgacggagaaggtcaggtgatcctgacttataagagattggcagcagagaaaggtaacaagcgtttggagcaggctttcgagactcaggaagtattgaaagcacctgtaactcaggtattggatggcggattgtgcgtagttgtggatgaggcgagagtcttcattcctgccagcctggtatccgatacttatgagaaggatctgagcaaatatgcagaccaggagatcgaatttgtgatcactgagtttaatcctagaagaagacgcattatcggtaaccgcaagcagcttcttgttgcagccaaggaagagaagcagaaagagcttatggagagaatccatgtaggcgatactgtggaaggtactgttaagaatgtaacagactttggcgcttttattgatttaggcggagctgacggccttctgcacatttccgagatgtcctggggcagagtggaaaatcccaagaaggtatttaatgttggggatgttgtgaaggttttgatcaaagatatcaatggagacaaaattgcattgtccctgaaattcccggaagaaaatccatggcttactgctgctgagaaatttgcagccggcaatgtggttaccggaagagtggcccgtatgactgatttcggcgcctttgtggaactggctcccggtgtggatgccctgcttcacgtatcccagatttccagagagcatgtggcaaaaccatcggatgttctcagcgtaggacaggagattcaggctaaggttgtggactttaacggagacgacaagaagatcagcctgagcatgaaagctatggagccggcgaacagccagcagtcacaggaaggtcctgctgaagaggaataagagtaataaaagcaaaaagccatctgtgcataacgtacagatggcttctttttttactttgtccagtaaggcaggcagcctttaaggtaatcttcaacctggctgggggaatccagaaattcctgggtacaggggaaccaggtgtaacaggtgttctgggtggcaggtaagcgcagtgaggcatccacgtagctgcctagggatttgtggactgccatatcctccccgggcaggtaatagtagcttttataatcctcgtacctgcggcggaggcggccctccttcatggtgatcttaaatttcaccctgctgttctctgcggtaaaatagcagtcctctttggaataggagatgacggcaggaaggggatgctccagagagcattgacacagcagacagccgtcttctgtgcgggcctcctgaaccctcagatgcccctggataaaaagcctgtaatggagcaggggcaccagccgtgacagtcccagaaggtcctcctggttgtgccccaggagaacttgagagagactctggtctttggttttcatgaacttttggtagaggggaatgcaggagcccccgtctgtgtagactctggaggtattttgatccagaaaattttccagatcgggctgcctcatgcgctccagctttagaagggatttgcagggctggagaagctcatacagatccagggaggtttttttggaaaaaatagaatccatcttatatttcatggtccggtattccacaaaggggatgtcaaaccgtttaccattataatggacaaaggtgtcataggacctggaaaattccctaaagtggtccagaatggagacttcatcttccatgctttcccccagccattggatgagaagggcttttccttggtttaagatcagtccgccaatgaggtagatgaaagaacgctcccgggataagccggtggtctcaatatcaaaaaacatggttttttctgcctggcatccctggcaggcttctagctgatgaaagctttgggcagcatcagaaaattcttttgtgatggtgatcataagtgttccactcctttacatatggctattatataagtttttttggggaaattcaaatagacttttcttggttggatttctagagagtcttaaaactggaaaaaaacagaaggaggcaaaagaacagcttttaaagaagtcagattaattccgcgtttttctggaaaatcaaaacggttttcagggagaaaaggaggaaaaatgaggacagatcggcaggaaaaaagtgtcttttttttaacgatatcaagtgcagaaaaccctgtaaaattgcggtttttttaacaatctgcccctgcaagattgtacttgattttgtacccggaaaatgaaattacttagtgctttttagtgaaaaaagttgtatattatatataacaagattttgaaaatttaacttcatcaagaaagcagtgaatgggattttctatatccgttttcccaggcaggatttcgtgaaggaagatcctggtgaagttatcagtgacaagtaggaggaatatgacagaaatagcaattgcgggtgtggacctctatcacctggtgagttggttttatgtttacagctttttaggctggctttgggagacctgttttgtgtcagcaaaaagtggaaagcttgtgaaccgaggatttattaacggccctttgtgcaccatatatggttttggggccctgagtgtatatttgatcttaaaacccatcgaggaccgtctggtactcctttttttcgggggaattctggtggctacggtactggaatatgtgacggcagttcttatggaaagaatcttccatacctcctggtgggattacagcaggaaaaagtttaattttcaaggcaggatctgcctgggggcttccctgggctggggcgtatttacagtggtcctctttcggatcctgcatccctttgtttcacgatttgtggatctttacccaatattgatcggggagattgccattggcctgatcagcgccgggtatgtggtggattttgccttctctgcagcagccgccttccgtttgtcggagaagctggctgtcatggagggagagctggaacgggtccgccaggagcttacaggaaagatcgctggatttgcgggagctgcctctctggggcagatcaagggccgtgtggaggaactgttggaggatgtgaccatcttcaaagagctgggagaacgaggcttagagctgcgtgagcagctgctgggtgaattccaggagagaaagaaagcccttgccagacgtcagggacacaatgtgcgcagatatatccgtgcatatcctaatttaaataaggttcatatgcgccttgaggaaatgcgcagggaccggaaaaacaaataactttcctaaatttgttccagggaagaatatgaaagtaagcactgggtgcttaacataaaaggagggtaattttatgggaattttaacctttaagggcggaatacacccttatgagggcaaagaattgtccaagagccagccaattgaaaaatatatgccaaagggagagatggtttatcccctttcccagcatataggcgcacctgccgcccctgttgtgaagaagggggatcatgtgctggccggccagaagatcgcggaggcaggaggctttgtctcttctcctatccattcttctgtttcaggtacggtgaaaggcattgagccgcgcctggtagcaaccggaggtgtggtgaactccattatcattgaaaacgaccagcagtacgaggagatggaatttacacctgcggttctgggagagctttccaaggaggatattcttgcccgtatccgtgaagccggtgtggtgggcatgggaggtgcaggtttccccacccatgtgaagctgtcacccaaggatccagataagattgaatacgttctggtgaatggagcagaatgcgaaccttatcttaccagcgactacagaagaatgctggaggagccggagaaaattgtggagggcctgcgggtgatgctggccatctttgacaatgccaagggttatatttgtattgaagacaataagcccgactgtattgcaaaaatgcaggagttggtaaaagatattccccggatggaggtcaaggagatgatgaccaagtatcctcaggggggtgagcgtaccttgatctacgcagccacaggaagagagatcaattcctctatgctgccggcagatgtgggctgtgtggtggacaacgtggatacggtggtggctatttacaaggctgtacttttgggccggcctgtgatgagccggattgtcaccgtcaccggggaggccattgccaatcccaggaattttacagtgcttacaggaacgaatatggctgagctcattgaggcagccggaggactgaaggatcagactgccaaggtgatctccggaggacccatgatgggattttccatgtttgatctaaatgttccctgtatcaagacctcctcggcatttctgtgcctggagcatgacgctgtgtcagaatcagaggggactgcctgcatcaactgcgggcgctgtgtcagtgtctgtccggggcatgtgcttcccgccagactggcaacctttgccgagcacggagatatggagaattttgagaaatatgacggaatggaatgctgtgagtgcggctgctgcagctatatctgcccggcaaaacggccgcttacccagagcatcaaatccatgaggaaaatggttctggcaaacagaaagaaaaaataagggggaagaggaaagatggatcaaatgttgcatgtatcgtctaacccgcatgtgcgggataagatgagcacaagtaagttaatgggtctggtggtaatcgcattgcttcccgccagtgcctttggagtgtggaattttggccttcatgctttgctggtgatcctggtgacggttgcgtccagtgtgatctttgaatggctgtatgaccattttatgcacaagaagaacacggttacggatctaagtgctgttgtcacaggccttctcctggcattaaacatgcctccgcagattcctctgtggattccggttgtgggaagtgcattttccattattgtagtaaaacagctttttggaggactgggccagaatattatgaatccggctctgggcggaagatgctttctgctcatctgttttgcaggaaggatgacggatttcagtaccgccagctcccatgtagtggacacggtgtcaggagctacccctctggcagccttaaaggccggggaagcggtggacacggccgctatgtttgtgggaaatatcaaaggaaccatcggggagacctcagtgatcgcacttttggtgggagcagccatcttgctggcggccaaggtcattgatctgaagattccacttacatatatcggcagctttgctgtctttgtgatcctgtatatgctgttcacgggaaaaggatttgacgtgaactttctggccgcccatctctttggcggcggactgatgctgggtgcatggttcatggccacagactatgtgaccacccccatcacccccaacggtcaattgatctatgggtgtgtgcttggtatcctcacagccctgttccggcttttgggcggttctgcagagggcgtatcctatgcgatcattttcagcaaccttcttatacctctcattgaacgggtgacccgtcctgttgcatttggaaaaggagggaaaaaggcatgaaaaataccattatcaaagataccatagccatcacactgatcacgttggtggcaggtttccttctggggatcgtccaggatatcacggcggaccccattgcaaagcagaaggccatggccaaggaagaggcctacaaggcagtttttgccgatgccgattcctttaaccaggtgattgaacaagaagatccggatctggaagcatatctggatgaaaacggctacaaggcacagtctgtaaatgaagtgatgcaggctctggattcctcagggaatccgctgggttatgcatttaccataaccagctctgagggctacggtggtgacattcagtttactatgggcgtgaaggaggatggtaccttgaacggcatctccatcctggatatctccgagacggcgggccttggaatgaaggctgacaccgatgatttcaaaaatcagtttaaggataaaaatgtagagaaatttcaatatacgaaaaacggcgcttccgcagacaatgaaattgatgcattaagcggcgccaccatcaccacaaatgccatgaccaacggcgtgaatgccgggctgtgtgcattccagtatgaaaaaggagggaaggaatgatgaaagccaattcaccatcagaacgtttggttaacgggattatcaaagaaaatcccacctttgtgttaatgctgggtatgtgtcccacattggcggtcaccacctctggcatcaacggcatcggcatggggcttaccaccacagtgattctggctgcctccaacctgatgatctccatgcttcggaaattcattccggataaggtgcgtgttcctgcttttattgttattgtggcatcctttgtgaccattgtacagcttcttctggaagcgtttatcccaagtctttatgattctctgggaatttacataccgttgatcgtggtaaactgtattattttgggaagagcagaggcatatgcctccaagaaccctgtgatcccctctttgtttgatggtatcggaatgggtcttggttttaccttaagtattacctgcatcggtctggtaagagagcttttgggcgccggccagcttttgggctatcagatccttcctctggcagatgcggcagcgggaaaagcaggttatgaaccaatgaccatctttatcctggctcccggagctttctttgtcctggccttcttatctgccttccagaataaattccgtctgggtgcggccaagaggggaattgatcccagcaacccggataaatgcggcggttcctgtgcatcctgcgggaacagcatgtgcaaaggaaagaaggaggtataagccatgaaggaattgttgatcatcggaattggttctgccttggtaaacaacgtggtgttaagtcagtttctgggtctttgtccgttcctgggagtttccaagaaaatcgatacggcggccggaatgggtgcggcggttgtgtttgtgctcaccttgtcatcctttgttaccagcttgatctatacgtttattcttgtccccaccaacctgacctatctgcagaccattgtgttcattctcatcattgctgctctggttcagttcgtggagatgttcctgaaaaaggcaatgccgcctttatatagggctctgggtgtgtatcttcctctgatcaccaccaactgtgcggtattgggtgttgccctcatcaatgtgacgaaagattacaatgtgcttgaaggaaccataaacggctttgccacagcggtgggctttaccattgccattgtgctgatggcgggacttcgtgaaaaaatggaatacaatgacattcccaaggcatttcagggatttcccattgtcctgctcacgtcaggactgatggccattgcattctttggtttttcaggattaatataaggaggcggaaggtatggatatgagtgcagttcttatggcaaccctgatcgttgccgcggtgggcctctttattgggatttttctgggatttgcaggaaagaagtttgctgttgaggtagatgaaaaggaagtggcagtcagagaagcccttcctgggaataactgcggcggctgcggttttccaggctgcgacggtctggctgcggctattgccaagggagaagctccctgtaacggctgcccggtagggggagagccggttggaaagatcatcgccgagatcatgggccaggaggtggtggagaccgcacgccaggtggcctttgtaaaatgcggcggaacctgtgagaagacaaaagaccagtatgattacacaggggtggaggactgtgagatgatggccttcattcccggaggcggagcaaaggtatgcgcctatggctgtctgggatatggaagctgtgtaaaggcctgtccttttgacgccatccgtattgtgaacggtgtggctgtggtggacaaggagcagtgtaaagcctgcggaaaatgtgtggctaaatgtccaagacatctgatcgagctggtgccctatgaccagaagacctttgtgaattgtgcatccaaggcaaagggaaaggcagtgacaaatgcctgtgagatcggctgtatcggctgtaagaaatgtgaaaagaactgtccggccggtgccattaccgtgacagatttctgtgcccatattgactacgaaaaatgtaccaattgtggcgcttgtaaggaaatctgtccaaggggtgtgatcctgtaaccgggacagatgatttgtgttttatagaaaaacggtacagctttgggctgtaccgtttttctataaaagaacaggggttcatcctgccagcatggccagggttcctcctgtgaccaggcacagtccgagaaacgcttttcccgacagcttttctttaaagacaaagtgtgaaaaagcgatagtcaccagaatgcttagtttgtcaatgggaaccaccacgctggccagaccgtcctggagggctttgtaatagcatagccaggaagctccggtggccagtccggacagacagatgaagagcagctcgtttctgggaatttcccggatggtgtgctgctttttggtgacgaagaccacaatccaggccatgatcagcaccacccaggtacggatggcagtgcccagattggagtctaccccggaaatgccgattttccccagaatagcagtgaggctggcaaaaaccgcggacaaaaaagcatagaccatccaggctctcccgtggccggtttttgcgccggtggtctcctttttctgaatcatgagataggtgcccagggcgatcgccaaaatagaaaatcctttgatcagggaaatgctctcatggagaaataaaaaagccagaagaatggtcattatggtgctggatttatcaatgggcaccaccttgttcacgtctccaagctgcagggccctgaaatagcaaagccaggacgctccagtggccagtccggacagaatcaaaaagatccaggtctttaagctcacctgggatacatctgcggattttgtaagaaatacaagaatccaggaaaacaaaagtaccacgatcgtgcggatggctgtggcaacattggaatccgtttttttaatgccgcattttgccaatatggacgtgacgcctgcaaacaatgcggagccaaaagcataaaatacccacatagttatctcctccttggcaatagtttagcatcctctaaggaattatacaaggcagagccggcaatccacagataaatataaatccttccaggaaggcagaggagagaatttcccgaataggtgtttgccttttggaaagttctatgatatgatattaaagattgtaatacccggaggaatccatgaagaaaaaagatcgcattttagcaggagcaatattggctgtggccctgggggcctggctggccgggcatttcctcctggccggaaatgtgcacaccattcgtatcacggtggatgcaaagctgtacggagagtattctctggatgaagaccagaggattgacattcaaattcccggaagggatcagcctgccaatgtggtggagatttcaggcgggaaggccagtgtgacagaggcagactgcccggatcatctctgccagcaccagaagcccattgacagcggcggggggaccattgtgtgccttcccaaccgtgtagtgatagaaggagtgaagatccgcggcggttcccccagggatgacgtggatgcggtggcaggataagatgaagacaaaaaaaacagcagttttaggtttatttgccgcagtggccattattttcggatatgtggaaaccctgcttccggtatttgtgggagtgcctggcgtgaagctgggacttgccaatctggctgttgtggtgcttttgtatgtgtggggtgtaaaagaggcggctctcgtatcggctgtgcgcattgtggtcattggcttccttttcggaaatctgttcagtattgcctacagccttgcaggggcgggtctgagcctttgtgctatgggaattataaaaagatgccgggggttcagtattgtgggtatcagcctggcagggggagtcagccacaatgtgggccagcttttggtggctatggccattgtggagaacttcagcctgctgtattacctgccggtgcttcttgtgtcaggagtggctgcgggaatggtcatcgggatcatctccagggaagtggaaaagagaatgggagctgtattgaaaatatgattgcatttataaagggaattgtggcggagatcacagaaaacggcattgtgctggaggcgggggcgatgggttatgaagttcatatgtctgccgccagtgtggataaggagctatatcagggaaaagaagtgaaggtgtatacctatctttatgtgcgggaagacgccatgcagctttatggatttcttaccaaggatgatctcaaggtgtttaagctgcttttgggcgtgagcggaatcggccccaaaggagccctgggagtcctgtccgggatctctcccgatgagcttcgctttgcagtgctttcggatgatgtgaagaccatctccaaggctcctggcattggcaggaagacggcccagaagctgatcctggagctgaaggacaagctgagtctggaggatgccttccaacagaagctggctaatgtgcagcaggaggcatctgtggagggacttaaggagacggtgcgtcaggaggctgtggaggctctggtggccctgggctacagcggaacggacgccctgcgggctgtgcgggctgtggtccctgaacaggcgcaagatgtggagaccttgttaaaggcagctttgaaaaatatgtagaggtaggatgcaatggagaaacggataataacaaccgatgtcaccgaggaggatctgcctctggaaggaagtcttcggcctcagaccctggatgaatatattggccagaagaagaccaaggacactttgaaaatatatatagaggcggcaaagcagcgccatgatgccctggaccacgtattgttctacggaccgccgggacttggcaagactactctggcggggatcattgccaatgagctgggggtgcatctgaaggtcacctccggtccggccattgaaaagcccggggagatggcagcgatcctgaacaatcttcaggagggggacgtactctttgtggatgagatccaccggctgaaccgacaggtggaggaagtgctgtaccccgccatggaggattttgtcattgacattatgatcggaaaaggggcgtctgcccgttccatccgtctggatcttccccattttactttggttggggccacaaccagggcaggactgctcacggcgcctctgcgggaccgattcggggtgatgcaccatctggagttctatacaaaagaggagctgcagaccattatcatccgctctgcccaggttctcggggtggaaatcgacgggaagggggcaggggagatcgccaagcgctccaggggaacgcccaggctggctaaccggctgctgaagcgggtgcgggattttgcccaggtaaaatatgatggcaggatcacctatgaggtggcagaatttgcattggatctgctggaggtagaccgatatggtctggacaaggtggaccgcctcatactgaaaaccctcatcgtaaattttcagggaggtcctgtaggactggatactttagcggctgccatcggcgaggacgcgggaactttggaggatgtgtacgagccctatcttctgcagaacggctttctctgccggactcccagaggacgcacggcgggagcgctggcctatgaacatctgggttttgagaaataatggttgtttttttacatatttcgattataatagtagataagaaattacggaaagatacaggaggcttgtactatggcagcgaagaacacggcacaagtggtcatcggagggaaaataattacgcttggtggctatgaaagcgaggagtatttccagaaggtggcatcctatatgaataacaagattgcagagcttagctctatgccgggttattccagacagccaatggagacaaaacacactctgctcagcttaaacattgccgatgattatttcaaggcaaagaagcaggcggagatttatgaacaggacctgcagcaaaaggatcaggaaatgtatgatctgaagcatgaattgatctctctgcaggtgcagacagagactgccaagaaagctgcggaggatgctaaggcggagaagctggagcttcagagcaggcttgctcaagcagagaaggaactggacgagctattgaaaggttaatcagtgaacaaaagataaggggattgcttgggtgcaatcccttttcctgtctgttctccccgatagaatggggacagccagaagagtcacgcaggaaaaagaatgggagaggaactgcttatgatcgagttattggccccggcggggtcttatgaagcctttgagggagccatcggtgcgggagccgatgctgtgtatgtgggaggaaatgctttcggagcacgggcctatgcacaaaattttaccacccaggagctgcttgcagctatagatgagtctcatctccatgggaagaaattgtatctcacagtaaatacattggtaaagaatagggagttatatgaaaccttgtacgagtatctccgtccttattatgagagaggacttgacgctgtcattgtccaggacctgggtgtgatggaattcatcagaaaaaatttccccggtcttcccattcacgccagcacccagatgacggtgacaggccctgcaggaatgaaattcctggaggaaaagggcgtcaggcgggtggtggctgccagggagctgtctttaagagaactgtctaaaatgcatcaggccagttccctggagatcgaagccttcatccacggagcactgtgttattgttactccggccaatgtctattcagcagcctgctggggggaagaagcggtaaccgggggcgctgtgcccagccctgccgtcttccctaccaggtggctgctcagggaaaaaatgcttctcactctagggaaatctacccgttgaacctgaaggacatctgtaccattgatcttttgccccagattattgaggcgggggttacttctctgaaaattgagggccgtatgaaaaaagctcagtacactgcaggagtggtatctgtgtaccggaaatatctggatctataccaggaaaatccaggcgccttccaggtgctggagcaggaccgcaggtttcttctggatatttttaaccggggaggctcctgccagggttattttaaagtccacaacgggccggagatgatggccttctctaatgataaaaaggcggccggagcccctgtggaaattagaaaaaagaaagaaaaaatttatgggaatttaatgttatttccagacagccctgttatactggaagtatcctggaaaaattataaggcagcagtctcggaaggccttgtgcaaaaggcggaaaatcagcccatgaccagggaacggatctgccgtcagatggataaatgcggaaattctccattttgctgggaaaggctggatgtggatatggaagaagagatctttgtccctgtgagggtgctcaatgaagtgcgcaggaaagccttccaggccctggaggagaagattttatcctcccatgtgcgcaagagcccaggtaagcctgaacaaatgggtaaagaggtcctggacaacaggaagaaggaacagccatggctctatgcctcctgcgagacaaaggagcagatggaagtgctgttggcagccagagagcttcgcggcatctatgcacccatggaggttttgaaagcctatgttcatcaggagctgcccagggagaaggagctgtatctgagccttccctgtgtggtgcgtggagaaatgccccgggaatattgggacaaggcagaacagcttctgaaaaagggtctgaagggctttctggtatcctgtctggaggcctatgccatggtgaaggagcggggatatgcacacctgtgtgtggcagaccactccctatatacctggaatcaagaggcagttgctttctgggacagagaaggaattctgagaaatacggttcctctggaattaaatgctggggaaattgcacacagggataaccggaacagcgagctggtggtgtacggttatctgccgctcatggtctctgcccagtgtgtgaagaaaaacattgggggttgtacgggaaagaaggaaaccctatggctgaaggaccgttatgggaaggaatttccggctgtgtgcatctgtgatccctggaatctgggaatgacagggggacaaagttgttataataagatttataactgtctgcccatggggctgcttcaggaaaagtccgcggtggacaggctgggaatgaaaagccttcgtctgtcctttaccctggagaattccagggagaccaaaagaattttaaaagaatttgtggacacttatgaatacaacaaagacgccggggaaggagagttcaccaaaggacactttaaacggggcgttgagtaaggggattctatggtaaacgtgattgcagaattatcaaaatatgtgattttgtcattaatgcttctatacacctttgaatgcttccatgtgcttcgcatggaaaatatagaagacaagaagcagattttattaaaacagatgatgctcatattctttatggattccgtggcgttttctgtgatttatttaatcacggaggaattccagatcgtgattttttatatggaggttctggtgttctttgcagcggtgcagattctgtacaggattttttataagcaggcttctatgctgcttatcaacaatatgtgtatgcttttaagcgtgggctttattatgttggcccggctgaatatgtctctggctgtgagacagctcatgatcgtggcggcgggaagcgccatagccctggcggtgccggtgatgatacggaaaatgaaatttctgcgcaggctcacctgggtctatgcgggcattgggatcgcccttctgggagccgtgttcctcctggccaagactacctacggagcaaagctgtccctcatgggcattcagcccagcgaggccatcaagatcacctttgtgttctttatggctgccctgctgtggcagcaggcggattttaagaaggtggtccaggctaccctgatcgcaggccttcatgtgggaatcctggtgctgtccacggatctgggaagtgcggtgatcttttttatcacctatgtggtgatggtgtatgtggctaccagaaaggcacgttatgtgggaatcggacttctggggggaggagtggcctcggtcattgcctaccatttgttctaccatgtgcagcagcgtgtgatcatctggcaggaccctattgcctcctatgacaatggagggtaccagattgcccagtctctctttgggatcggaactggcggctggttcggcatgggactgtgccagggagacccggaggtgatcccggtggtgaccaatgactttatttttgcagccatctgtgaagagctgggggggatttttggtatctgcctgatcctggtatgcatgagctttttcctgatgatcgtaaatatttctctgcagatcaagaatccattttataagctcatcgccctgggacttggcacagaatatgccttccaggtatttctcaccattggaggaggcactaagttcatccctatgaccggcgtgactctgcctctggtaagctatggaggcagctctgtcatgagcaccattttgatgctggccatcattcagggcttatatattctaagagaagacgaggatgaagaaattgagagactacgacaggaagcagcaaaaagagcagctcaaagagcagaagcagctggagcggctgaggaagaaaaggcagcgcgccagaaacagagaatataggtatgtatcttatttctttgccgccatttttgtgagtctggctgcctatctggcttatttcaacgcggtgaaaagtgaatcctttattaacagtccgtacaatacaaggcaggacagctttgccgaccaggtggtgcgggggtccatcgtggcctccacaggtgaggtcttggctgagacgcagtatgattgggagggccatgaatttagaaattatccctatggttccatgtattcccatgtggtaggttatgacagccatgggaaatatggtctggaatcagaggccaacttccagcttcttacctcccacgcctttttcctggaacagatgaaaaaccagtttcaggaccagaaaaacatgggtgacacggtgctcacctctttggacaaccggctccagagcgctgcctattatgccctgggagacaataagggagcggtggtggccatggagccatccacgggcaggatcctggccctggtgagcaagccggattttgatcccaatactttggatgccaactgggattatctcatcaatgatgaaaacaacagcagtcttttaaacagggctaccacaggccagtaccctccgggttctacctttaagatcatcacagccctggactatttcaggagcaaaaagacactggagggcttcagctacaactgtgagggagagatcaccaaggaggggcatacccttcagtgttataatggagagatccatggccaggaggatctatattctgcctttgcctattcctgtaactgtgcctttgcccagatgggcgtggatctgggggggagctctttgaaaaaaacggcggacagcttattgtttaacaaaaagcttcctctggaaatggactacagtaccagcaaattttctctggatggaaaatccggagtccctctcaccatgcagacctccattgggcagggaaataccctggtatctcccatgcatatggccatgatcacaagtgccattgccaacaatggtatacttatggagccttccctcattgacggtgtaaacaattaccagggagagaaggtatcccggacaaaaccctctcagtataaacagcttcttacctccaatgaggcgaacattctcacaaatttgatgaagcaggtagttgagtatggtacagctgtcagcctgggaggaagaggctataccgttgcaggcaagaccggctctgcagagattgatgaggaaggaaacagccattcctggtttgtgggattttccaacgtggatgatccggacctggtggtgagtattattgtggaatacgggggcacgggaagtgagtctgcagtgccggtggccgcccagatttttgatgcctattattacggatagccatatccttgccctgccgattgagcagagcccggcatgctcttgacgaaaaaagatctcccatgaaaaataaagatctcccatgaaaaatgacctgttgccagttttcataaaaagaggtatactgtatatagttttttataacacacgcattacaggaggaattgcaatgatcgaggcaacgagctgtggcggtgtggtaattcatcgtggtaagatactggcactatttaaatcttacaaaaaccgttacgaaggatgggttctgcccaagggaaccgtggaaaatggggagagtcatgaggagactgcacttcgtgaggtaagggaggaagccggcgtgcgtgcctcggtggttaaatatattggaaaaagccaatataatttttccgttcccgaggatacggtcacgaaagaggttcattggtatctgatgactgctgacaattatcatagcaagccccaaagagaggagtattttattgactctggctattacaagtttcatgaaatctatcatttgctgcgatttgccaatgagaagcagattgtagagagagcctaccaggaatatatggaactgaaaagtgcaggcctttggccaagaagcaagtattgattttcagggctgttttttaacagccctggtttaaattttggagataagggaatccttatgaaaaaggacaaggaaatgttgaactggtataaaaattattatgtgggagaggggattcaggatccgtccaggattcaggagaagctggaccgcagtcaggctgtgccggggatctatctgatcaccctttcggacaatccggggaacatgctggagctattttccgcagttatgctgaagcagccggcctttcgcaggttgtgtcccatgattgtgggaatggcaaagggaaaggatggagcagtggacttggtgcaggaaatgctcagagattcttttagggaaacaggcgcgtaccaggtagcagattatttgaagaacaggtgatgggatgttacatattctgtggttgattttgaaagttatattaatactggcaggtatcatcctcggactggttctcctggctgttctgctgcttcttttctgtcccctgtgttactggggagaggcttccaagacagagggcagccttggggcaagggggaagatcacttggctgtttcgggcagtttccgtaagctttgcctacgaaaataagaaccggaccatgggtatttgcatatttgggatccctttggagaagataacagggcttttgcacagagcagagggcagaaaaaaggccgggaaaaagaaaagaaagcctaggactgtgagatctgtacaagaagggcaggagcgaagccttccagattcgaattcacaggaaagcccccgggaagaacttcctcagcagacagagccggagcaggcagatgcagatctgacaccagtgggtgggccggaagaagaacttccgtctgcggtgaatgagaaggaagaggaacagcggtccacagtgggtgaaagtgaagggccgcgggaagagtttttccttaagactctgtggaagaaaataaaaagcttttttcagggggtaagagccctgatgaaaaagttccttcttctttttgacccggtggagggtcctgtgggaaggataaaaaggctttttgagaaaatttcatacacaattcataggttctatgataaaataaatgaatggaaaatatttctgggagatgcccacaccagggctgctgtgtctcttgtatggggacaggccagggtgcttctggggcatgtgtcccccagaaagcttcagggccatgtgctttttggctttgaggatccgtcaaagaccgggctggtgctggctgtgttgggtatgacaatgcctcttcacaagaatagaatcgccgtggagcctgtttatgaccgggtggttctggaaggtgaagtacagcttcagggaagaatatatggatttgtgttcttaagagcagcatggaagatatggtttgacgagaatgtgagagatgtaagaaaacgctggaaacagaaggaggtagcatcagcatatggaaaataattttaaagagacagtgaattccctttttaaaggattggacagttttgtgtctgcgaagacggttgtgggagaggctatgcacattggagataccattatcctgcctttggtggatgtgacctttggcgtgggtgcaggtgccttcgcgggagaaaataaaaataacggcggcggcggaatgactggaaaggtgactccctgcgcagttctggtcattcagaacggcaccaccaagcttgtgaatattaagaatcaggacggacttaccaaggttctggatatggttccggactttgtgaacaaatttacttccggtactggctttacagcaggagctaaaccagaggatgtccaggaggatgtcttcacaaaagaagaagctgcttcagaagaaaagtgttcagaggaataatcccggcatatagtaaattaaagattggattttaggggccggggacatgttatgaaccgtttactgggcttgatcttgttttttatcggtgtgggtatggtgatctgcctgcttgtgccccactgtgtattaactgctttgacggcagccatattcttgctgctgggataccatttgttctgttattaaaggatgcgggacctttctgggaggcccgcataattaaaaaccctctgtataaatacagagggttttagctgctacgctttctttaattgcttccggggaagccattctgaatgaaatcttacgctctttcaacttttccggatcttaagcaagaggtacatacgtacattttctttgcagcaccgttggcagtcttaactttaacggattttacgttggatttccacattttattggatcttctatgagaatgactcacattatttccgaaatgagcacctttttcacaaattgcgcacttagccatcatagcacctccttgacgcttttttcaacaagttcaattctaacagatgaaaatcttttttgcaagtaaaaaaagcaaaaaattcaaattaatatttcattttcagagaaaagaggttataataataggcatatgaagaacataaatggaggtaacctgtatgaatggacagatagattccggtttaggtaagattaccgttgacacagatgtaattgcaacatatgcaggaagtgtagctgttgaatgttttggtattgttggaatggcagccgtgagtatgaaggacggccttgtgaagcttcttcgcagggagtctctgcggcacggcattcatgtaaagcttcaggacaataagatccgcctggatttccatgtaatcgttgcgtatggcgtgaatattggagcaactgccgataatttggtcagcaatgtgaaatacaaagtggaggcctttacaggaatggaaattgagaagatcaatattttcgtcgaaggcgttcgcgcaatagattagttaagaggaggatacctgcagtgaatgtgaataccatagatgccaaaatgctgtccagaatgtttctggccggtgccaagaacctggaagtaaagaaggagtggatcaatgagctgaatgtctttcctgttcctgatggagacacgggaacaaatatgaccctgacgattatgtcagcagccaatgaggtgggacagctggctgaacccaccatggaatccctggcaaaagccatttcttccgggtccttgagaggagccagaggaaattcaggagttattctgtcccagcttctcagaggatttaccaaggttgtaaagaaggaagaggttctggattccatcaccattgctgcggctatggagaaggctgtggagacggcctacaaggctgttatgaagcccaaggaaggaactatcctgacagtggcaagggaggctgccctgaaggcggctgagattgcggcagatacagaagatttgcaggcattttttgaagatgtgtttatacatgcccaggagacattggagaaaacaccggaaatgcttccagtgctgaaggaagcaggggtggtggattctggcggccagggtctggtggaagttttccggggagccattgacggatttttgggaaaagaagtggattattctttctcctccgcttccccctcaccggcagttaccaagatcagtccccaggcagaggcggatattcaatttggttactgcaccgagttcatcatccttttggagaaagagatgccggaggatgaagagcttttgttcaaagaatttttaatgtccattggtgattccattgttttggtggcggatgaggagattgtgaaggttcatgtgcataccaaccatcccggccaggctattgagaaagccctcacctatggggctctttcccgtctgaaaatcgacaacatgagggaagagcatcaggagaagctgatcaaggatgcccagcgtctggcagaggaacaggccaaagagatggttaagaaggagccgcccaaggaggttggttttatttccgtatctgtgggagagggaatggctcagatatttaaagacttaggagttgattatcttatccagggcggccagactatgaatcccagcacagaggatatgctcaacgccattgacaaggtaaatgccaagaccatttatatttatccaaacaataagaatattatcctggcggcaaaccaggccagagatctcacggaagataaagagatcatcgtgatccctacaaagaccctgccccagggaatcactgctctcatcaactatgtgcctgagaaatcgccaaaggagaatgaacagatgatgatggaagccctgtcaggagtgaagaccgggcagattacttatgcagtccgtgatacccgcattgatgaaaaggaaattcatgagggagatattatgggaatcggggacaagggaattttagccgtaggccagggaattgaccaggttgcagaagaaacggtggattccatgatggaggaggattctgagattatcagtctttattttggagagggtgtttcagaggaccaggcagaggcattgatgacaaagcttcaggataaatatccccagtgcgatgtggaggccaattacgggggacagcccatctattattattttatatccgtagaatagcaaagaatgatcaggatacggggatgctgcagcggcggtgtccccgtttattgctgccttgcggggacggaagtacaggaggcaggaattttttcttagttactttgaattaggaggatagatttttggttaaaaaattgagagagctgaaaggcgtgggagagaagacggaaaagctgtttcaaaagctgcatattaacactacagaggaccttctcaggtattatcccaggaattacgatgcctatgagccccctattcccatcagcgggcttttagaaggccatacggcagctgttgtgggaactgttacttcagcggtccatgtgggccaggtgcgcagcctgtctgtggtcacggtgagtatcgcagattccagcggcaaggttacagctgcctggtataatatgccctttctgagaaataccttaaaacggggcagtgtttttatattccggggaaagctggtggtcaaaaaaggaagacagcagctggagcatccggaaattttcacgcctgctgcctatgagcaggtgctccatagtctgcagcccatatacagtctgacggcgggtatcaccaacaagaccatcacaaagctggtacgccagactttggaagaatcctttatgctgccggaatatctgccagaggaaattagagagcgcttccatctggcagattataattttgccatccagaccatccactttcccaaaaatatggaacagctcatcactgccagagagcggctggtctttgatgagtttctgctcttcatactggcggtgcagcttctcaaggaaaagaccgaggaggcaaaaaatgaatttcccatgaagcagacctggaccacagaacaggtcattgaaaatctgccctatactcttaccaatgggcagaaaaacgtatggtatgagattgagagggacttgggaggcgctgctcttatgtccaggctggtccagggagatgtgggaagcggaaagacgattttagcctttttggctatgatcatggcggcagataatggttaccaggcagccttaatggttcccacagaggttttggcagagcagcattataaatccctgtgccggcttctggaggaacaaaatctgaccatgtgccgcccggtccttctcacaggctccagcacagccagggagaaaagacaaatttatgaaaaaattactacaggggaggtgaacctgatcgtgggcacccacgccctgattcaggaaaaggtggagtaccaaagcctggcccttgttataaccgatgagcagcaccggttcggggtaaagcaaagagaagcgcttaccaccaagggtgctccgcccaatgtattggtcatgagtgccacccccattccccggaccttggctattattttgtacggggatctggatatttcagttctggatgagctgcctgccaggcgccttcccataaaaaattgtgtggtggatactggttacaggcccaaagcatattcttttatggaaaagcagatccaggcaggccgtcaggtgtatattatctgccccatggtggaggagagcgagggtctggaggcagaaaacgttctggactatacgcagcggttgaaagaaatttttccggaggcggtgcatatccaatcccttcatggaaaaatgaaacccaaggaaaaaaatcagatcatggaggcctttgaaaaaaatgaaattcaaatactggtttccactacagtagtggaggtgggggtggatgtgcccaatgccacggtgatcatgattgaaaatgcagagcgctttggcctggcccagctccatcagttaagggggcgtgtaggcagaggggaacatcagtcctattgtatttttatgcagggaaacaaagaggaagaaacctcccgcaggcttgccattttaaataaatccaatgatggattctatatcgcatcggaggatctcaggcttcggggtccgggggatttatttggaatccgtcagagcggaagcttggaatttaagctggcggatatcttccaggactcccagcttctaaaaaatgccagtgaggctgctggggagattctggctctggacagcggcctggagcttccccaataccagcttttgcaggaaaagctcaaggaatatatgaaggatgagctggaaaatttaggactgtagcgagataaactcttgcaaattttatagaaaagtagtattctatcctagaaagaattatttacccgtataaggaggctattatatggctacgaaaaaaagtacgaaaaatgtagaagctgctgtagtaacagaggtttctgcacaaacaccggctgcagaggcagcgcctgaaacagcggcagagaccaagaaacctgctgagaagaaggcaaccagatcaaccacggccaggaagacgacctctagaaagactgcaacagaaaaaacggctgcaacagagaagaagaccacaaccagaaggactgccgctaagacaaatacagaagtatatatccagtggtggggcaaagaagtctatgcgaaggatattgtccagcgagtgaacacaatttggacagaagagatgggcaagaaagcatctgacttaaaagacctgaaaatatacgtgaaacctgaagagaatgcagctcattatgtaatcaatggtgacatcacaggaagtatcggattataagattttctgcagtatctgtaaaaattaaaaagtttttcagccccaggctgagacctgacaagaatgccgtatgatctacaaaggattgtacggcatttctttgttgtataccaatttctctgatcctgcctgggcttgcattcttttgccggaatctgtagaatagggtgcagagaaccagaaatgtgagagatggaaagaggaaacagtcatgagacagattttgatcgttgatgatgatattcatattggaaatgtagtggaggaagtacttgtcaaggaggggtatcaggtatcccgggcctattcggggacagaggcccttctctatttatcttcctgcaggccggatttgattctgctggatctgatgcttcccggcttaaatggagaagagcttctgccaaggatcaccaacattcctgtgatcgtggtcagcgccaagacagatgtgtcagacaaggttcacatgcttctgggcggagccagagattatgttaccaagccatttgatgtgaaggaacttctggccagaattaccgtacagctgagaaacgagggcctttctcaaaaccgggacagggtcacctttgaggaaatcctcatggacatggcagcccacagggtgaccgtgaaggagattcccgtaaaactcaccaggacggagtatgcaatcctaaagctgctgatgtgtaatcccacacagattgtgacaaaatcggctattcttgataaaatttgtgaagatacaccggattgcacggaaagctccctgaaggttcacgtgagcaatctcaggaaaaagctccgggaggcaggaggaaaggattatattgaagcggtgtggggcattggctttaaaatgaaggaggttgaaagcttaacggtttcttaacggttttcttaactgctttcttaaccattgttttatatactgccattatcaaaggaaaaggagaaagaaaacaatggaatatgttttaaacacggatgctttatgcaaaagctatggaacggtgaaggctttggaacaactgtccatgcatgttcccaaaggggccatttatggctttgtaggaaaaaacggtgcaggcaagactactttaatccgtgtgatctgtggacttcagcagcctgatggtgggagctatacactctatggaaggaagtataacagcaagggtatcccagcagcgagaaaacggataggggcagtggtggaaagcccatccatctatcttgatatgacagcccgggaaaatcttaagattcagtatcaggttctaggtcttccttcctatgagggcatctcccagatattaaagactgtggggctttcccacacaggaaaaaagaaggcggggaatttctctcttggtatgcgtcagcgtcttggcatcgcagtggcattggcgggagacccggattttcttgtgctggatgagcctgtgaacggtctggatccggaggggattgtagaaatcagagagcttcttttaaggcttaacaaagagaagcagatcaccatattgatatccagtcatattttagatgagctgtccaaaatagccacccattatggttttgtagacaagggaacaattgtgaaggagatcagtgccagggagctggaggcatcctgcaggaaacgaattcgtctcatagtcactgacgtaaaggctcttagccgggtgctggagagaatgggaatggaataccgcattctgtctgaccgggaggcagatgtgtatggccagattggggttacacagctcacattggctcttgcccaggagggctgtgaagtgaaaaatatgtaccagtgtgacgaaagtcttgagaattattatatcaatttggtgggagggaaggaccatgaataatttgctgcatgccaatttttcgcggctttggaaaagcaaggtgttttggcttggaacggggattctgcttatttggtcagctgcctttctacttggagcagctccccgtgaggaaatagcgctggaggattatttttttgaatatggaccccttatgggagggttttctgctgtgtttatcagtttgtttttaggaacagactacagtgacggcaccatcagaaataaaattattgtaggtcattcaagaaccgctatctatttatccaacctgattttatgctggatcggacttattattatgaatggagtatggattgtggtaatgcttactctgggcagcttcttgctgggctggttccagtgctccgggatgatggtgctgctctatgtattaactaccgtatttatgcttctttcttttacggctatttttactctggtgagtatgatgatacaaaataaggcagtatcggcagtggctgcacttctcatatttctagctgttttatttgtgggaagctattttaataaccggctggaggaacccccaatgtacagcgggggacccaccataaccacagatggagaaaacatcacggccaagatacaagagccggaatacaatccggaatatgtagaaggagcccgcaggaaggtgtatgaatttttggtctatttccttcccacaggacagggaatctgcatggctaatcataaggcggataatattccccagatgatactttcctctctgtttataacaggtgccctcacaggggcaggagcggtatgctttcaaagaaaagatttaagatagagggttatttatatggagacaagatcgtaaagacagggaaaggctgctgagattccgcacttatggagttaggtgaaagacaggaaggatcatttgacacagacaaatgtaaatagatagaaagaggtgtgaggaaatgctgcttctgggaggtctctgtgtaatactagccgggataattattgctttggttatgaaaattcatcttatgcgaaaaggtgtccgggagattgaaacaggtctagagttcagactggagcatgacaccaatactctgattacattatcctcccaggatcagactttgaaaagtctggcaaacagcctgaatgaacagcttcgcagactcaggcaggaaagacgccggtttcagcagggggatttggaattaaaggatgcagtcaccaacatatcccatgacctgcgtacgcctctcacagccatctgcgcctatctggagctggcggagaaagaagagaagacacctgacatggaacggtacctggaaatcataaaagatcgctcacaggcaatgaaacagctcacagaagagttgttccgatattctgtagttatcacagaatctagggacagtgatcttgaaaaggtttccttgaacgcagtgttggaagagagtctctctgcttattatgctgtattaaaggagcgtgggattacacctcggatttccatgccacaggaacgagtttttcgatttttgaataaaaacgcacttacccggattttgggaaatatgatcagcaatgccgttaagtatagtgacggggatctgcagattgaactgatgaaaagcggggaaatggtattttctaaccatgcaccggctttggatgaaacccagacggggaagctttttgaccgattttataccgtggaggcagcaagaaagtccactggccttggactttctattgcaaaagcactcacagagcagatgaatggagaaatttatgcttgttacagggatggctgtttaagcattcatttaaagtttccggaggatgagaatatagaaagtgatgaagaaaggggaaaatgggagcgtggaatatgattggatgaagctgtgaggggctcgccagggggaggtaaaacctgcctgggagcctcacagggaaaagagaattaggagtggacgttctggcgcttgtgtgaatgtttgttcttatgaccttgtgattccgtggtgtttttggaatcttgtgattccgtggtgccgtagtctgccggaacgttattgtgatcttgtgattccgttacgccgtggtctgctgattcgttgttatggttctgtgaatttttgctgttgtttttggaatgttgtgctcccatgcttttgcagtcagaggactcctggcccgttgatgaggagtgagagtgggagtctggtgagagctgttggatccttttgtggatctgatgcatggtaagtccctggacgtcttctatggtaatatcagggtcaagggactgaagctccaaaaatgcccggtatttgccgaaggacagtccggcttcatgggcatgctctgcctcatgtgaatcactggcggagcagcagacatttcctacagaggccgtacaggagcttacattggccagcatttcttcactctttttctcatctgctcccatgacggttatggacacaacctgattttcagtgagatacacagccatgggatcgctggcaagaaggcgttccagtgcttccgtatagtccaaaaactttatatttacagcttcagccaattttcttccgtcttggttatagccttctacggaaatgactttatcaaaacgattcagtcccagttcaagggatggatttacatccacgctgatagcagagatttctgtaaaataagtatagtatcccccggcgccaaaaagcatgaacaccacacaggccaggacggcggtaagtcgtttcggataggcccgaaattgttggcggtcatgtgttttcttagcgagatactgccgggtatgttcctttagttcttcctctgcatggattttatcaaaggtatctttcagcctgtcattcatactcttcacctcccagcttgtctttaagcatacccttggagcgcgttaaaagggtatatacagaatttacgtttttcttgagaatgaggccgatttccgctgcagtatatccttcgtagtaatggagatagaccacgtccttgtatttaggaggaagggataacactgcctccaaaacctcgctgttgtcttccgtccattgagctggctggtcaaagagctcttcaatgggtacggtgcggctgcggaaaaagcttttgagaagatctttacaggcattgatggttacccggataaaccatgctttttcatgttcttcgctgtcgaaaacagtagaattaaggacatatttcaaaaaaacattttgaaatatgtcctctgtatcagagtagttttttagatgtaccatgcatagacgccggaccgtatctgcatacaattccattgccctgtttacttcctggtcgctgcgcatatggaaacctctttttaattattttatctgctgcatccttcaccatgactatggtgacttcctgtgcgggacagggagtaggaggactgtctgcattggtccgtgccaatacccttacagtccgaggcactggagctgtttccctgacaggcgcctataccaatctgcccattggaacaactgcaattttccttataagagttgcaaaaatcgcagatgccgtccttgtctgtatctgtgtagcggcagtgtgcagatttagatccgcactgattgcagatgccgtcgttgttatgatctgtgtattgacagtgtgtggagttggatccgcataaatcgcagacgccgtcattatcaatatctgtgtattgacaatgtgtggagtcagacccacataaatcgcagacgccatcattatcagtatctgtgtattgacaatgggtggattgagagccacatacgtcgcagatgccgttattatcagcatccgtgtagcggcaatgtgtggtttccaaaccattaaaatcacagatgctattgttgttagtgtctgtgtactggcagtcactgggatcataactgcagattctgttagatccggctgacgccctccctgtgtgaccatggcctccagccaaaacagcggtggttcctgtgataagtaaaattgctgccgtaatacctgccattgcttttttcattttctttttcctccattatttgttgtagtttaagttcttcaatgataatacgattcatggaggagaatccattcaaatattattaaaaaattccaactgatgaagaaattattttattacgtatttttcttccagttttccataccaccatatgtaaccttcagtgcccacagttacgaacaggcagaaaacaccaaggctgacggcaggattgaaatgtgcaatgagaccaatgagccaaaaaggaatggacagaactatgaatatagtactcacagagcgattgtagccctttacatcctttatttgttcttccgaataatgaaaggcagcacttaacttcattgtctttttcttgttccgcacataaatccctataagcaggagaacgagagcacatgcccagtttaaaactagaaaatataaaggttttatacaaattcctcctccaattaaagagacaatgaaatctattactgccattaacattttataaaaacagcttataactttttgagcggacagtcaatagtgttcagtcattctcttggaaatgtaaaaattagagaaatccaatgattttttagtataatgtttattttcttagtgggaactacacatacatctttgatattaaagaaaaaagctcaggtggtcaaaagaccatctgagcttttttagaaaaagaattgatttagaactgtccgcctgtagacatctgacgttcctgagcttcaatcatctttttcaccatatagccgccaacgcttccgttctgtttggaagtcaggttaccgttgtagccgtcagtaaggggtacacccagttcattagctacttcaaatttaaaacggtctaaggcactttttgcttcaggtactactactgaattagaagaattatttgacatgattcagttcctccttggttggttgtttttttgttacaatggtagtatatgatttttcttggagaataatctggaaatttcttcataataaaaactgtaatttacaatttaagcaaagcttttgaaaaatggttaattgtactaaaattatatggtaaatagccttgaggatatggtatagtatatctataaaatggagaaaaggaaaaagggatatgtgggaatatttgaaaatacttactatgagagcttgctttcaggcaaaagagccgggaatgctgccgccttacctgggctctactgtgagaggaattctggggcattgtatccgggaatcgtattgtagcgtatctgacaagaaatgttttcaatgtgaaaatagatttaactgccgttatgtgtcctgcttcagcaatacgggaaaggaatacggagccgtgaatccttataccattcatgtttttcagaatggcaaaacacaatggaataggggggatgagtgtatttttgatctaactctgtttggaactgccacagagtccgcagaagtatatttagatgccattttacaaatggagcggaaaggatttggagcttcccggcttccttttaaattagtttatatttcagaagcaagaagtggaaagctcatttatgcaaacggacgcacattccggtataatttgaagccttgttctttggaaacagaaggaggcgaggcaaaatccgttttggtctcttttgatactcctttgcggatagtgtcaggaaaggaactgtgccaagttccgtctttttatacacttattcgttttataacaggcagacttttacttctttcacaaatttatgcaggttataaaattgaatggaatgaaaagctcatggaggaacaggcaaaaaatgtaaggatcacggcttatgatatgagaaaggtggattttgtacgttactccattaacagggatgatggaaagctggaacttccgtccatgatgggatgggtgtattatgaaggagatctaagcttccttactccggtgctggaggcggggaagtatactcatgtgggaagaggggccacgattggtttcgggcattatgaaactttttatgataaatagttagcttcaaaagagtttacaaacttcttgcaggtatgttcaaaataccacttgtaaccggaaccataaggaacttggcatatcgttatgaaggtgcaggaactggtattgtaagtaaatcaagcagaaaatggctgactcagttcttaggtattttgacgcaataggttctgggtagataaaaaagtcgtgatgtgtttatgatactactggttttgatcggcgatatgcaccaagttattataagaacagtatctgcggatgccgatatagatattttttctttcttctgtatggtgccaatcaacaattttacaaaaacactaaatttattcttgcagtgaccgcctgaatcaggacatttgtgtagatatgagttttcagattaaagaaagcatcaaatgcatgctgtagacaccagggatacattttccaagtgagcagtaataatcgtctgatgaaagatggggtgttgatataagtgcatgttgagccatctgatgcaaagaaacagtgcttattgtctgagaaagcggtggatggtacttccaaagtagatgaactaacctggttaaatactatatggttttagcttggcacgctactgattagaaatctaagaagtaggcatgaatgaattgagctgtgtcctagaaccaaatattttactcctcggatttggaaacctatgtgaaacaaaaataatcttttgtgggagattttcctgtttttttgaaagtctgtatccaaatggacagaatactgtggaatgtcagaacggacctgttccatagctaaggaaaatatttttttgagtttttaaggaattattattgtgagcctccttgaaaagtgatatatttgtaattcaaaggccttactcgttacctctaaaatcatcggtaacaagaggactgcctattttcgatgcttatcaacttcattttaagaaaaaaatgattagcctcttgaggaaatccaaccatctgaatattaatatggaaactaactgacatggagtcctgaatagttgcagaaatgtataaaatagctcaagaatgatagaaattgcacaggtgcgaatcataagcaaacataaaatccctgggagattcgcaccggtattttgaatcaaaatcagaaaaaatcaatagaagataaaatgtagttgccttttattgggaaatagttatataatatgcacagaaatcaattgattttcaagaggacaattggtttgttttgcggtcgaagcctacatggcttcgtgaattgaaatttttattcctctgactctgccgcaaatctgaaacgtcgaagcctacatggcttcgtgaattgaaatatcgtgtggcatcctgcgcatacagggattatcgtcgaagcctacatggcttcgtgaattgaaattttacaactgacctatcaaaacaggaaatcagcagtcgaagcctacatggcttcgtgaattgaaatccatgcctaatgccgcaagcggtatgtatttattgtcgaagcctacatggcttcgtgaattgaaataaacaggactgataggatagtgtttttgatgtacgtcgaagcctacatggcttcgtgaattgaaatctcctggacggcggcgaacgcctggggaagaggtgtcgaagcctacatggcttcgtgaattgaaatcggccggaccgaccggacctgcagggccgactggtgtcgaagcctacatggcttcgtgaattgaaatcctggtcccgtgtttattgacacagaaggcagtgtcgaagcctacatggcttcgtgaattgaaatttgattggtatacggaagaaggagaccggatccggtcgaagcctacatggcttcgtgaattgaaataatggcaattttggatatcaattcatagaaggctggtcgaagcctacatggcttcgtgaattgaaatagattaccagacaggcgggtaagaatgagataaggtcgaagcctacatggcttcgtgaattgaaataccaagcttgaccgctggttccggtttctgcgccgtcgaagcctacatggcttcgtgaattgaaatcagggctttaagctgttctgcctgccacatggaccgtcgaagcctacatggcttcgtgaattgaaattccaaactggtccttctggtttgcaagagccatgtcgaagcctacatggcttcgtgaattgaaatccgtcatttccatttcgatgccaaaattctgtttgtcgaagcctacatggcttcgtgaattgaaattgtaggattgtaaacatctcttccgccgaaaatcgtcgaagcctacatggcttcgtgaattgaaatgattatcgtatgggtggacgaaaccggcgctattggtcgaagcctacatggcttcgtgaattgaaatactgcactgtacctctcacggatcgtctcaagtggtcgaagcctacatggcttcgtgaattgaaattggcaggcttgctggaagcggcaagctataaaacgtcgaagcctacatggcttcgtgaattgaaatatcttgacacgggttttggaagtgtatggggtttgtcgaagcctacatggcttcgtgaattgaaattggcaggcttgctggaagcggcaagctataaaacgtcgaagcctacatggcttcgtgaattgaaatatcttgacacgggttttggaagtgtatggggtttgtcgaagcctacatggcttcgtgaattgaaattcttaacagggacttataaacaatcgactcctccgtcgaagcctacatggcttcgtgaattgaaataattggatggaagatacaaactggatgggagcaggtcgaagcctacatggcttcgtgaattgaaatatctggcgaaaatccctttatattctcccaagtgtcgaagcctacatggcttcgtgaattgaaatgtttcataatccgtgattgaccatgggcaatctctcgtcgaagcctacatggcttcgtgaattgaaattctgtcaattctccggatataaagcagctttctgtcgaagcctacatggctccgtgaattgaaaccttgtggaatttctgccagaggaaaacggagatagccgaagcctacatggcttcgtgaattgaaacaaacaaagatttgtccaaggggctctatatagagttgaagcctgtgcggcttcgtagttcgaaacccagttgtgcagccattgtatgtccaaaatggtaagtataaaagtttgccgcatgggacaaaaatgacatcaattcataggaaagtgtgtctaaatataacgcaaaattaaaaatatataatatatttatcgccaaggattaaaatgaaagagtagattatgttaaaaagtgaaatttcaacttattaaaatacgagaaaattattcgaaatattaaatcagcggctaagttgtgatgtacaaggatttttaaagataatgtagttacgaaaggtggaacaagaatgtcaaacattactatgatacacattaactcaaaattggaggagatttttgaaggaaaaatagatacaactgattgtacagagaataatgaacagtcaacattttattcaagatcccttgctgcgctagcgattatgatgcaatgtggtattgatgcggagaaagcaagcaaaagtattacagatgcttataatgatatgggtatagatgctgtatattgtgatgctatacaaaagaaattagtacttgttcaaagcaagtggcgccgctgtggcacaggtggaatatctcaagaagaagtattaacatttattcagggggtaaagagtatattgtctttggattttgaaggtgctaattccaagatattacgaaaattaccggaaattacgagtgctataagaaataaggattatcaaatactatgtgtgtttacccatactggaaatcaggaaatatcaactttttgtcgaaaacccattgatgaattattgcaaaatacaaatgatgatacaaatgatattttgagttttgttgagatattacaatcagatatatttaaatacttggctgcgggacaagatagtgataatatatgtatagacaatgtgattttaaataattggggatttgttgatgaacctttcaaagcatattatgggataatttctgctgctacccttggcgaatggtattgtaattttgataataagttatttgctaagaatatacgttactacaaaggtgatacagaagtaaatcagggtataaggaaagtattattagaatcgccggaaaaattcttttactacaataacggtataaaaattctttgtaaaaaaatcactcgaaaagcagcctttagtacaaattcgaaaacaggtttatttgctcttgaaggggtttccctggttaatggagctcaaactacaggaactattggtatctcatttttagagaatccagaacaagttagtaaagctactgtatttgtccaattcattgaccttgcagatgtggatgagaattgcacattacaaattacgaaattgtcaaatacacagaacagaattgatagtaaggaatttgtagcatttgatccagaacaagaacgtctaaagacagatttgattttttcaaatatccattatctatataaatcgggtgctaaggttgatgatcccttacatcagatttcaatcgatgaggcaatagtggctcaagcatgtctgcaaaaagacattacatattcaactatttgcaaagaagatgtgggattgttaacagaagatataacaaagcctccatataaaattctttttaatggttcaacaaatgcatttgctatgaaaaatagtattgaggttttgagagctgtcgataaatacctccgaattcatgaaaatgattatcaggatagacatcgttgggttttaatccatggaaaccgctttattttgtatgctttattacaaaacataaagctccatccaaagtttatgactaaaatacttgatattggcgaaatttcagatttagttaatacacactgtgaaagaataattcctaaaatcgtcgatgctatgaatagtaaatttcttgatgcgtaccctgcgtatatttttgaaaatattgtacgttgtcgactattgttcgaagagattaatgtttctatccgggatgtaagcttctgacaaggcaattcctttgatttaggatcggtaagtggaatgcgcaatgcgtctgacatttctgtcaagtgcattgcaagcagtttattcaaattggtaagcagagagtcaaagtcatttttatgcagatatttgatgagttaggggcagaggtaaacaaatatagaaatttactgggaatgaattagaaatatatgggaatcctctaaaaataagaataaaaagtttaactaataatttctacaagaacaccaaaataaagacaaacgggttaaaatgttaacaattcatgaactttgtatattttgcaaaacatacttgattattatttgtgaatttgttacaatgtttaccagaaggattttgtaaatattaaattgtagatgtatgcaagagaaatggagacatagaattatgaatttaggtattatcgctcataacagtaagaaagtattgatagaagatttttgcatcgcctataagaatatccttgctaaacatgaagtctatgcaaccggaactactggtaggagaattgaggaagccaccagcctgcatgtgcacaaatttttggctgggagtatcggtggcgataagcagtttatggagatggtggagagacaggatttggatatggtgatcctcttttataatcctgtgatgattgatacgaaagagcctgacattaccgcgattgtaaagcggtgtgaccagtataacattcccgtggctacgaatattgcaacagcagagcttcttattttaggtcttgcaagaggcgacttggactggagactgaatctgaaatgagagtgatcgcgggaaaagccagaagactgaacctgaaaaccgttcccggattggatacaaggcccaccacggaccgtataaaagaaaccttatttaacattttgcagcctgagatggctgactgccggttcctggatctttttgccggaagcggcggaattggcattgaagcactgagcagaggtgccaactgggcggtatttgtggagaaggctcccaaggcggctgcctgtatccgtgagaatttaaggacgacccatctggaagagcaggggaaggtactgcagatggatgttttgcaagcattggcatacttggagagggaggagcctttccattgtatatttatggacccgccctatgagaagggactggagcagcaggtgctgaccgcactggctccgttagggctggcagatgaggaaactttgatcattgtggaggcatccctggagacagatttttcctatgcggatgcactgggttttgacatagtcaggaggaaagaatacaaaaccaatgcgcatgtttttctgcgcagaaagagagttttataatatggcgatagcagtatatccgggtagctttgacccggttactttcgggcatctggatgtaattaaacgagcaagtaagttttttgacggggtgattgtaggagttttgcagaattctacaaaaagtccgttgttttctgtggaagaacgtgttaatatactaaaaagggccacaatggaaatttccaatgtgaccattaagccttttgccggactttcggttgattttgcccgggagaatcaggcacaggtgatagtgaggggattacgggctgttacggattttgaatatgaattgcagatggcccagacaaaccgggtattggctcccgatgtggacactgtttttttgactaccagcttaaagtatgcttatttaagctccacagtcatgaaagaggtggcgagctttggcggggatatcagcaaatttgcgcctccccaggtcgtaaaagctattcaggagaaaatgaacctagtagagaaataaggataataaggagagaacattatgagcagcagaattgagcagattattgaagaaatcgaagagtttgtagataattgtaagtaccagccattatccacaacaaagatcgtggtaaataaagaggaattgtctgaactggtaagagagctgcgtctgaaaactccagatgaaattaagcgctatcaaaagattatcagcaataaagatgccatcctggaggatgctcagacaaaggcagacagtattatatcagatgcacaagcaaaggctcaggagttggtaacccagcatgagatcatgcagaaagcctacgcacaggcaaacgagaccatcaatgcagccaacagacaggcacaggaaattttggactccgctacacaggatgccaacagtatccgcttgagcgccatcacctatacagacgatatgctggcaaatattggtggtcttttgaacaatacccttgaggatgctggcggcaaatataagatgtttattgaagctttgcagagttgtctggatgtagtgaaccagaaccgccaggaattggcaccgcagacagcacaggctgcagcgatcaccagttcctatcatgacgattcccatgaggatgacagtttactggaagacctgaacgaagaataaggtcataaggagagtcagacaggcattcactgttttggctgcaagataaatttttattgacaggccgctttctctgagtacacttttggtttgggccagaatgcatagtcctccaaaggccgtgcaggtcatggctgccgggtacagaagagaagcaggcatggctgattttgacaaaaagtataggcctgttgaaatctctgtcataccgagaagcaaattttttccaggaagccgcacaggccagaaatggctggctgcggctgctatgagagaaaagaggagaatataacctcccaatcgggtgatggtttcaaaaccgttcataatggagagatctatgtatgctcctggcgagtgtggcgtggatgtctcctttttttcacaggctgcaagttgtacggcttctttgtttctaaggagtaaccggaaaataagagagcacagcaggtcagctgtgtataaaatcaaaaaggatggaagcatcaatcttttttgtcccaggcactggagtaccacataggtggacaggaacatggggcttgcattgtttacaaaagtcagcaggtagttggcttcggttttggaaatttttccatggttgtataaatcggatgtgagtttggcgcccatgggatagccacacagcattcccagaaggaatgcgtaagctccgtaaggggtaagtccaagaaaaaaagaaaagaatcctttcaggggttttaaaatcttatcaatacagccggaataaatgagcaggttggagagaatcataaaagggagcagggtgggaagcaaggtgttcagccatagattcattccctgccgtgaggcttccaatgcttctttaggaaaacaaaaaagaaacagcagaagaagcaggatcccgctgacaaatagataacgtttcatggagttcatattccttttccaatcttatttaagtatatgaactttcagagaatacatgaaattattttatggaggtgctgttatggcagtattagaaaattgcgaaccgaaaagggtatttcattattttgaagagatctgcaagataccccacggttccggaaatacaaagcagatcagtgattacctggttaactttgccaaggaacatcaattggaatatgttcaggatgagatgaacaatgtggtgatctacaaaccggcggctcccggctatgaaaatgccccaaccgtgatccttcagggacacatggatatggtgtgcgaaaagaggcctgacgtggaccatgactttaccaaggacggtctgaagctggcagtggaaaacggatatattaatgcccagggcactaccttagggggagatgacggaattgctgtggcctacggtctggcgcttttggagagcacccatattccccatcccccactggaagtcctgatcaccgtagatgaggaaatcggtcttttgggagctgtgggttttgactgcagtgttctaaagggaagacggtttatcaatctggattctgaggcagagggaagtgtgtggatcagctgtgccggcggtctgtctggtatcagcaccattcctgtgtcccgtgtgccggcagaaggtgagaagctggatattaagatctgcggtatgctgggcggtcattccggggcggaaattgacaaaaaccggggaaatgccaacaagcatatggcaaggctgctctacggactgggaaagagactggattatcagctggtttcctgggagggaggacagaaggacaatgccattccaagggaatccaaagccactgttttgatggaaaaagaacagcttccagaggccaaggcttatatttcttctgtggaaaagcaactgaaagaggaatatgcaggaaccgatgagggtgtacgcattgaagtgacagagaatggttatgcgcaggttatggtccttcatccttccagctgtgaaaaggtgttgttctatgttcagcatgttcccaatgggatccagaaaatgagcggctccatagaggggcttgtggaaacctccaccaatctgggaattctcagagtggaagaggacagactctatgccagctcaggagtgagaagctcggtggaggcggccagagacgctctttctgataaaattgaatacctcacggaatttttgggaggagaatataccatacaggggccttatcctgcatgggagtatagaaaagaatccccgctgagagatttgatggtgaaggtgtatgaagagcagtatggagaaaagccaaatgtggtagcgatccatgcaggtctggagtgcggactgttctatgagaaaatggaaggtctggactgtgtgtccatcggaccgaatatgaaggatattcatacctccgaggaagtgctggatatcgcctccactcagagagtgtggaactacctgttgaaggtattggaagcaatgaaatagagggattgatcaggctgccgcaaaatgagaattgcattttgcggcaactttatataatgaaaaatgtgcggatggcggtcgtgcaggaaaaccggaggtcagaagaaaagcttgtgtttttgccaaagatagaatatttcatagagattgttgaatctggaagtcttacaaaggcagctgaaaaattatatatttcccagccttctctcagccagtatctaaagcgcctggagacaaatcttggggtggagctgtttgatcacagcacatcgcccctgcggcttacctttactggagagaggtattacaagtatgttcttgagatggcccggctggatgagaatatgcgaaaggaatttcaggacattaaaaatgaagagagcgggcggctgcgcctgggtattgccttgtggcggggagcatgtctgcttcctgatgtatttccatattttcatgaacaatatcctaaaatccatctggagctaatggagggacgttccagtcagctggaaaatgcgctgatcaacgacaatattgacctggcggtgatgaatcttccctcccagcttaattacagcaagcttacctgtgagacgattttggaggaacccattttgctggcggtgcccacacagaatccctatgtacaggaactgttaaaatccgggattgggcaggggcaatatcctacagtttcctttgagattttgaatcgcattcctttgattcttacaaagccgggtcagaatcttacctaccaaattcaaaattttcttggaaagaaccagctggagccggaaattctgctggaaaccggaaatctgactacagccatcaaccttgtatccgcaggtaccggctgcgcctttgttccaggagagggggccaaggtctgtgctcatcctggccgggtcacctatgtttcactggacgcggacagcttaagctggcctctggccgcggtgtaccgtaaagatatgtatcttcctaaaatcagccggctttttattgataccctaaagctgctgcttgtgccttgaatggtttcgttttctactttaagatttcgcagccgatttcctgtaatttttcttgtacccatggacggatataggtgccatccttaagaatgtgtttcaggatttcagcttcttttttctccacagccatggtggcagtggagatttcttctgccatatccggtggtatgatgaccacgccgtcatcgtcgcccacgatgatatctcctggatgtaccactttaccaccgatgaccacaggaacattgatctctccggggccgtttttgtagggcccgttgggcgtgacggagcgggcgtatacaggaaagtcttccatggcagccaggccgccacggtcccggatggcaccatcgcagacgattcctttaatacctctggtcttacaataagtggccatcagctctccgaaaattgcccggtctgtgaagccgcctgcatcaataacgatcacatctcctggcttggccaggtccattgctgcgtggaacataagattatctccctggggtacacggacggtaaaagcggttcccagaagccggcctttcccaattggttcaattgccgaatccacggctgcgattctttccattgtatcatcaatgttggcaactggcatattcttgaatttatctactagttcctttgaggggcgtacaaaatctttatatattttacatcctgttgacatttctcttcctcctaaacaaatttgtattctgtatttttagtaatgacggtacggttggccacgtttctggcggggatctctccagtgagtactccgcagggaatcagcctgcacaccatgtcaatctgggttttctttgcacccatgccgtaggagccgctgtgagggccaaggatcacattatccatggccagaagagggtcatccttggcaatgggttcctgttctaaggtgtccagtccggcgtagagaatttctccctctgccagggcccatgccagatccttttgatgtatgaccggtcctcgtgaggtgttgatgatcatggcagtttttttcattttttggaaggcctcccggttaaaaacatgagtggtctccggagtcaaattcacatggacagagatgatatcgctttgtgtgagcatttcttcaaagcttacaaaatccacatggggatactgctctttcatgctttgtgatatgtagggatcacaggaaattacccgggttccaaagcccccctggaagatgtcgtggaggtgtctggcagaggctccgaagccatacaggcccagggtcatttcccgcacatctcccgggagcagatattcacatttgggccagcctcctttacggatctctctgtcatagtaattggtattgcggatcagtcccatgatcatagcagtagccaggtctgccagctcctttgcacagaagccgggaaggttcagcactatcttgtccagcctggatgcggcatccaggtcaatggaatttacccccacaccgaatctctggataaattttaacattggcagagcttctaatacctttttggttatgggtggattgccggttgccagaagtatggctgcttcctggcagttttctatgatttcttcttctgtagtaaaatgacaacatttcagggagattcctgctttttcatatgcttgtttcacctgatctaattctgaggcagtgacactgccataatctttgtctacaacaattgcctgcatgttcaaacactcctttgcttttctaatgtctttataaggtccaaatgatagggatcaaaattaaggatgcgattaatgtcaatacactcaggccgatgccaggcacaaagaaatctcggaagcccagattgccaggtgtgataatgagtgtattggttcctgagcctactggtgtcaggaaaggggcagaggctgccacacagatggctacgccaacagccactgggtttatgccaagacttatggcaacaggaacaaacaaaggagttaccagcactacggtggaggtgttcatcataaggttggtcataatcatggtcacaaaaagtacaatgaacaagaatagaaatttatttggatgatctccaagaagcttgaccacactgttggcgatcaagtcgcctgctccgctgctggccatggccttggacacggcactcattcctcctacaataaacagggtgggccagtctacagccttcattgcctccttttcgctgatgcagccggtggcgatgagcagcacacagcctatggctgcgatgaaatacatgggccattccttgttggatacagccattgcaattaacacggcggcaagtatgatcagacaaataccgccttttaccgggttaaattgttttcctggttcctttttggtatattcttccagatatgcccggtcagaagagtcccctggagtgagcagcttcttgcccacagtgagaaaataaataaggaacaggatacatagaggcaagccaacctttccaagctcaaagaaagataaaaactcaattcccatatcttcgatcaggcctgctgtgctcacattgctggcggcccccacaagagtcaggttgcagccaatggaagcagcaaaggacaaggggatcagctgcctggatacagagacattggccttcatgctcatggcgatgacaatggggagcatcatggcaaccactccgacgccggaacagatggaagacagtaaaagtcccaccaggacagaggcgatcataataccgttttctgaagtgcctgtgatcttcaccagcatatttgccattttgtcagcaacacctgtatgaaataatgcctgcccaatgatcatcatacctgccagaagagcgatggtagagccggcaaaggaggaaaagacctctgccttttcaataatgcccagacaggccaataggatggcacctgccatggagacaagtcccagaggaaacttatcggtaataaataacaggaccatcacggccaaaataataagtgtaacaattgctggattcatatagaacctccctgattataaatttttgctataatctaataattaacaatcttcccatacctttttcatacttggagttttatggggaaaggattgttttcagcaagaatttgtgcacatatttgctatgtttttatattactgcaagaacacttatctggcaaatatcaataataaaatatagattataacttttggattataattattgcgaaagcagagggtatcattcctgtacatggcgaagcgtgttttcggtgacgaagtaaactacccattgtcaaaaccaatgggcagtttatagttgaataggcaaagattttggttgtgaggaatatagaattgatgtataattatcacaagaaaagaaaggtcagagggatatgttggagaattggagagaaagaagactactccttttaaagttttgtgaaaagttacagagtgaatttccagaaattgattataacatatttgtctttggcagttatatacgggaagattttgatcctataaacagcgatatagaccttgtcatatattgtcagaatgatgagaggcaggataaaatatctcagtatgcaaaaaagtttttccagacttataatttggaatgtgatatcctgcaatactatttttctcctaatgcatcaatattttatcctgccattatgaatgcaataaaactcacagattattatccaatgcagctgcaaaaggagttgtacaaattaagaaagtattatgatatagaatgtgtgaaaagaagaaaacgagagaaatatttgtggtgggactatatattattaaaagcaggtattgttaaagaaggaggggattctaaatggtagatattcctgaggagctggaagcgtatggatttgaagtgagaaactttgtgaggcattgaatagtcggttgaatcactttacgcaggcgttcatagatattgcatcctatattcagattattagaggaaaaggaataggagacaaagtgcgcataaaagactactgctataatagtatccccgcatttgcgcccgcgattaacataaaaaaaccataaaagaggctcaaaagaagaaatagcttgatgatgtcagaacgagccatgctattcatattaagctaaagctgccagtaatacgaatctaaaccggaacttgcaaaggttagaaatgtgttccgcaaagcgcacagaaggaaaaagaacgtgataaaaatatcaggttctttttttgtgtcattatgcatacactgtataggtacgggaggtggtgagcagatgaaaggaaaagagatcgcaggactggcgctgacagcgatgctgtgcgtttcgttgaccacgattcttagggagcgggcagaggtttccatactgccatcttatccttgcgagacacagcagttccgggaacaggacctgcccgcagagcttttccttaatattcagaagcacaatggcacaaaggaaaaacagatgaggcttctgactgataccatgctggaagggggatttcaccccagcagtctgggacaggagaatcctttgtttgaaaagtataagacagaagagtatctggaattattgcaggggtatcaggcgatctggcaggatgtggaatttttccccgtttccggggaggacatcagtttctccaacggatggatggaggcccggacctatggaggagacagaaagcatgagggcattgatctgtttggacctgtggatacaccgggctactaccctgtggtgagtatgactgacggtgtggtggaacaggtgggatggctgactctgggcggctatcggatcggtatccgctcccctgagggcggatatttctactatgctcatttggactcctatgaccgggaattttccataggagatccggttcaggccggggaaatcctgggatttatggggaataccggctatgggaccgagggaacgagggaccagttccccgtgcacctgcacatgggaatctatattaagacaccccattatgaggagctttccgtgaatccctatgaggttttgcgggcagtccaaataggtgggacaaatttttcacaatcccccgaaaaatttacatataaatagagaaattttcaggattgtatgatataatataaaattgtatggaatgtaggaggaacgatttgtatggaaatacagttgtggagaagcatcttatgcccctatgagctggcagtacaagagttggttgtaaagtttgaacatttaattgttgaacataaagaaaatgatttatattcccccattgagcaggtatccggaagggtaaagagcgtatccagcatactggaaaaaatgcagcgcaagcacattcccatggagcgtatggaggaagatgtggaggatattgcgggaatacgcatcatctgccaatttgaggaagatatccaggctgtggcagagctcatatccaaacgcagcgacatggagattaaaagtgagaaaaattatctgaagcatatcaaggaaagcggctaccgcagctatcatttaattgtgtactacaccgtccagaccatccaggggccgaaaaagcttcaggtggaaattcagatccgtaccctggctatgaatttttgggcgaccatcgaacattcccttcaatataaatataaaggggatatgcctcctcatgtgacccagcgtctgaccaaggcggcggaggccattgaatcgctggacagagaaatgtccaccgtgcgaaatgagatcatggatgcacaaaattcctcccagatgcagtcgaatctggtgaaggacattttaaataatatagagaatctctataagctttccaatcaaagggaagtaatgaaaattcaggatgaattcctgagagtttaccgcacaaaggatctgcagcagctggaacggttccaccggcagctggatattatcgccgagggctaccgggcccagtcggtgtctgtgcagatttaacaggagagattatgctagaaggaaaagaagcagttatttttgatctggacggcaccttggtggattccatggaggtgtggagtgacattgacctggaatatttaggaagcctggggttttccgttccggaggatctgcagaggatcgtggaaggaatgggatttacggaggtggccgtatactttaaggagcggtttgggattccagattccattgaggatattaaacaggtgtggcaggatatggccatggacaaatactgccatgaggttcccttaaagccgggagtgaaagggtttctgcagtatctcaaggaaaagcagattcccatggcagttgcatccagcaatcacattgcgttgatcaaggcagtgcttaagagccacgggatcttagaatattttgactgtatcatcacagcctgtgatgtgaaaaaaggcaagcccgccccggatgtctatctggcggcggctgcggcccttggggcagagccccggaagtgtctggtttttgaggatattgttcctggaatccaggcaggaaaaaatgccggaatgaccacctgcgccgtggaggacaggtacagtgctcctcaaagagaggagaagaaacagctggcagattattacataaactcttacgaagaaatttttgccctgtaatccccggagtctgcttaacaagatatctttcgggacagcagcggctgtgagaagcagcaaaggagagtgcaatggagggatttttacccgtaaccttagatgacatgataagcagaggatgggacaggccggatttcgtctatgtgacaggagatgcctatgtggatcacccctcctttggctgtgccatcatcacccggcttttggagagccggggctataaaatctgcataatttcccagcccgactggcgccgggaggagagtatccaggtgttcggagagccgcgcctgggttttcttgtgagtgcaggaaatatggattccatggtgaatcattatactgtatccagaaagcacaggcagaaggacgcctactctccgggaggagagatgggacttcgccctgaccgtgcctgtattgtatacagcaatttgatccgcaggatctataagaccgttccgattattctgggaggcattgaggccagtctgcgccgcctgtcccactacgattattgggataacaaggtgaagagatccatccttttagattctggggcagacctgatctcctacggtatgggagagcgttccattatagagatcgcagaggccttggacagcggccttccggtgaaggaactcacctatatccctggtacggtttgcagaagaaaagatcttggggggattttagctccctgtattctgccttcctatgaggcaggcaaggaggacaaaagaacctatgccaagagctttgcctgtcagtataagaacacagatccctttaccgcccttgttttggcagagccctatgaggggcagggatatgtggtccagaatcctccctcaaagcccttgactatggaggaaatggacgatgtgtacgaccttccttacacaagaagagcccatcccatgtatgataaaatgggaggcattcctgcccttgaggaggtaaagttcagtcttaccagtaaccggggctgctttggagggtgtaatttctgtgcactcacttttcatcaagggagaattcttcagacaagaagccatgcctctctggtaaaagaggcccggcagatgacccaggagccggaatttaagggatatatccatgacgtgggagggcccactgcagatttccgcctgccttcctgccggaaacagctcacaaagggtgtgtgtcagaaccgtcagtgtctgtttcccaccccctgtaaaaatcttcaggtggaccatcaggattatctgaagctccttcgtaccctgcgggagcttccaaaggtgaagaaggtatttatccgttctggaatccgttttgactatgtaactgccgacaaggacaagtcctttttaagagagctggtggagcaccatgtgagcggtcagctccgggtggctcctgagcatgtgtctgaccaggttctgaaatatatgggaaaaccttcccacgatgtttatgagcagtttttaaaagagtatcataaggaaaatgaaaagaccgggaagaagcagtatgccattccttatttcatgtcctcccatcccggctgtaccatgaaggatgcggtaaagctggcagaatatgtgcgggatttaggctacactccagagcaggtgcaggatttctatcccacaccctccacattgtccacctgtatgtattatacaggactacatcctctgaccatggagccggtgtatgtgccagtaaatccccatgaaaaagccatacagagagctttgatccaatataagaatccggccaacaaagagctggttttagagggactgaagctggcaggaagagaggacctcataggcttcggccccaaatgtctgctccgtccccgccggtatgaaaaggaaggttcttttaaggccggcagtgaaagacagaacgggaaagattcccaggccccaaaggcttatatcaaaaagaaaaccatccgaaatgtacataaaaagaaaaagaccaatggaaagtaaaaggagactacccgttacatgaaagcaaaagtgaaaaaaggtgattttggatattttaaaagcgagaagaagaaacggcttctgattaccttatttttattcgctgtgcccctgctgatattttttaccggctggatttattttggaaaccgcaatacggttttcacagtgatcgcagcagtgggatgtctgccagcctgtaaatctgcagtgggacttgttatgatgcttatgagaaagccgatggacaagggtctgtatgacaccatttcagcccatgcaggagagctgaccatgagctacgaaatgtatattaccttttatgaaaaaagcggctatgtggatgcctttgccgtatgcggcaatgaggtggtgggctacaccagcgactcatcggtggacacggcctttctagcccaggagacccagaaaattgtgcgaaaaaatggatataaggtaaatgtgaagattttgaaggatctgaagccttacctggaacgtctggattctatgaatgagcacaaggagtccctggaaaaggatattaaattcaagccggatgaacgttatccggagctgtccagaaacgagctgatcaagcacaccattctggctatcagcctgtaaggaggacgccgtgaaggaacttgtgatcaaagaaaacgaagcgggccagcgctttgacaaatacctggcaaagcttttaagggaggcgcccaaaagctttgtatataaaatgctgcgcaagaaaaatatcaccctcaacgggaaaaaagcctcaggaagtgaaatactggccttgtgggaccaggtgaagcttttcttaagtgacgagacctttgaaaaatttgcgggggaaggactgacccaagagcagcttccgtcctgtgaactggatattatctatgaggatgcccatgtactttttataaataagcctgcagggatgctgtcccagccaggagaaggtccacagccgtccctggtggaatacgtcacctcttatctgctcacctccgggcagatgacagaacaagatctggcggccttccgcccctctgtgtgcaaccgcctggacagaaatacaagcgggctggtgacggcaggaaaaagtcttccggggcttcagggcctttctgctatgttccatgacaggaccatggagaaatattatcttaccgtggtccacggagtgattgaaaaggaagattttatcaaaggatatttgcataaagacccaaaatgtaataaagtagtagtaacttccactcctgtcccgggagcgcgtcccattcagaccagatatatccctgtgtgcaataacaaaaaggataccctgctgaaggtagagctgcttacaggacggacccatcagatccgcagccatctggcaagtatcggacatccggtggcaggagacggaaaatatggcatggagtctgtgaaccggtactacagaaaggtctatggcctgaattatcagcttcttcatgcctgggagcttgtgtttcccagccttgagggaagcctgaaggaattgtcaggcagaagtttctgtgcccctcttcccaagctttttcgacagattctggagggagagcagcttttccttccataaagggaaagagacagatggcagctataggcgggacacttgcaaaatggaggacaatatgaaaatttggaaagagatttgggaatacctgaagctgatcattgtcgtggtcgtcattgtgcttttggttaatcatgtggttttgatcaatgccaagattccctcagaatccatggaaaaaaccattatgaccggggaccggatcttcggcttccgtctgtcctatggaatcaatctggacctgtttggccttgagatttcaaaaaagtggaaggatccggagcggtttgacgtgatcatttttaaatacccggatgatgaggaccagctatttattaagcgtctgatcggtcttcccggggagacggtggagatcaaggatggaaaggtatacattgatggagcacaggagcctttggatgacagttttacaccagagacacctttgggaaattttgggccctatgaggtgccggagaattcctattttatgatgggagataaccggcagaattccagggactcccgctattggaccaatacctttgtgacctttgacgagattgtgggaaaggctgttttccggtattatccttcctttaaaattatacgctgaagaggagagacagatggcaacatggaattccaggggcctgaggggttctaccctggaggagctcattaacaggacaaatgaacagtacagggaaaaggggctggcactcattcagaagataccgactcctattacacctgtgcgcatggataaagaaaaccgccatattacccttgcctattttgagcagcgcagtacggtggattatatcggggcagtgcaggggattcctgtgtgctttgatgcaaaggaatgtcaggcagatacctttccgctggccaatgtccatccccatcagatggagtttatgagggcctttgagaaacagggaggcgtggcattttttcttatttttttcagcaaggatgacagattctattatctgcggctaaaggatttccaggtcttctgggaccggatggaggcaggcggccgcaaaagcttccgcagggaggaactcatggaaggcttttacctgaataagcagggaggcattctggtgccctacctggaaggacttcagaaggatctggaggcaagataggatcggtcctgatcacagcataagaaaaagaatagtgaggagcagagctatgaagatttggaaagaactttgggagtatgtaaaaatgatcattgtggtggtcattgtggtacttattatcaacaacgtggtattgatcaatgcaaagatcccctctccgtctatggaggacaccattatgaccggagatcggattttcggtttccgtctggcctatggggttaatctggatttcttcggcctggacatttcaaagaaattccgggatccccagcggtttgatattatcatcttcaaatatccagatgatgaaagccagctgtttatcaagcgtctgatcggacttccaggagaaacgctggagatcagggacggaaaggtatatattgacggttcccaggagcctttggatgacagctttacccctgagactcccactggagattacggccctgtccagataccggagaactgctattttatgatgggtgataaccgtctccattcccatgattcccggtactgggacaacaccttcgtgacctttgacgagattgtgggaaaggccattttccgttacttcccttctatcaagatgataaaatagaataattaggatagaaaaatagatgaaaccggagcagtatttgtgcttgagtttccgcaaaatgtaatttcaaaatagatataacttcccaaagtaccaacctgctggatttttgaaagaaaaagaacaacagcctgttgagcagacgcactgaaataagccccgctggaaccggactttgggagaactattcttttatctatttaagcggctaacttaaggcagagttgacggtatgccggtctctttgtccggaaccagagcctgacgccctcttttgcatacgaaagtatgccagagatacctttcgcaagccgataatagcagaagaaaactttttcctttacaggatctgctgtttttataattgcagcctttagtgcattggtttctgaaatcattgagatcattgccagaaatgccatgcatagggtgatataaaagttaagcgcattgatagcacaaagctttcgtacacggaagttttcgaattggaacatctgctttttacaacggaaatattcttcaatcttccatctggaaaaataggttcttgccacccgaattacatcttctttcgatttaatttctttgttggtggcaagcatcattggatgttctgttatgccataaacaagtaccagataaatctcttttctggatgctgtaatctgaactttcacatgggaaagataggcttcatgtttttttcctttataaaatacactggttttgatcttgccttttctacgatcgcgaagttcggtagcaggagtccattttccatggtacagaagttttcttttggaagtaaggcgaatgacataatcctgtttcaggtcatccagttttaggaacatcttgttatcgtcataaccacggtccatgcaaaaagtcgcttttccaaagagtgcagcgctctgttccattgcattaaaagtgattgcatttgcagatttatagtccttttcagaagatgaatgaatgcgagagaatatgctgacagggtgattgctggtagtaagaacacaagcttctgtgacatgatagccttttttgtatatattttttgtcgaagtgctttcagaaccatcgcggacaataccaagtgactcaaatttataaccatcgggttttacaacatcactatcatcgatgtgaatcactggttgagagggggcccattttttcaccatctgaagataggaaacagccgactttgtaggggtacctttctccagatgcctggaaagtcgatcaacaatgttaatctttttagaattctcgtgaagctggtcaacaacatctgttaagagacaacttttagccgccaacatgccgtaagtgatatccgcagtaaatttacgttcaggtttggagagcagtctagaaattttatttgtaaaagtaagaatttttcgtttcaatgtgtaagtatttgatgtaaaattagccataaggaatctccttctttttgtttagtggattattttgtggtgatttaattttacatcaaaaaggaggaagattccttatattttaggcatttattgaaagttgtttataagaacacagctaaactcaaggttgtgtggatagaactgcggaaactcaagtatttgtgggattgacaatcctggacagatagagtataatctgtatactgtttaatttcatctgctaccacagtagcatagtaaagtataactggaggcaaatcatgcagcgaatttttcatactccggaagggttccgggatatttataaaaaggaatttcaagaaaagcagaatctgcagaagaaaatcggtcaggtctttaaccgtttcggatatgaagatatccagacacctgccatagaatattttgaagtgttcagcaaggaggtgggaaccaccccctcaagagagctgtataaattttttgacagagatgggaatacactggttcttcggccggattttactccctccatcgccagggcggcagccacctgctttttaggagaggaggaagcgctgcgcctttgttaccagggaaatacttttgtgaaccattcaggtttaagaggccgtatgagagagaacacccagatgggcgtagaatatatgggagacggcagtgcggacgcggacgcagagatcctggctcttctagtagaatgcctgaaggaggccgggctgtctgaatttcagatcagtgtgggggaagtgaatttcttcaaatccctgctaaaggaggcagacattgatgaggattccgaggaggccctgcgttccctgatttcccagaaaaactattttggtgtggaggagctggtccgggagcagaagatcaacaaggagctcacggaggcatttctccgtctttcccagctctttggctctgctgacattctcaaggaggcccggaatctcacggacaacacctgtgccctggaggcagtgtccagactggaagagatttatgaaattttgaaaatctatggttatgaaaaatatatttcctttgacttgggaatgctcagcaaattccagtattataccggaattatcttccagggctacacctatggcaccggggaacccattgccaagggaggccgctatgacagccttcttcagcattttggcaagccctctccggcagtaggctttgggatcggcgtggacctggtccatctggctatgaaccggcagaagcttgccattgacactcctttggcagccagagagattatctatgacggagccagccgggagactgccatcaaggaggcagccgctcttagagcacaaggcattccggttgtactcagaaaagagaaggaggaccattcatgcgcgatctgaccattgcccttaccaagggacgacttgctgataaaaccttgaaaacctttgaaaaaatcggtatcacctgcgaggagatgaaggataaggattccagaaaactaatttttgtcaatgaagacctaaagcttcgctttttcctggccaaggggccggatgtgcccacttacgtggaatatggggcagcggatataggaattgtgggaaaggacaccatcctggaagaggggcgcaagctctatgaagtactggatctggggtttggagcctgcagaatgtgtgtgtgcggcccgcccagcgcaagagaagccctctgtgggaaccggcagatccgggtggctaccaaataccccaacattgccaaggactatttctacaataaaaagcatcagacagtggagatcatcaagctgaacggctccattgagctggctcccattgtgggcttgtctgaggtgatcgtggatattgtggagacaggaagcacccttcgggaaaacggcctggaggtgctggaggaggtctgcccgctgtctgcccgcatggtggtaaaccaggtgagcatgaagatggaggatgaacggatccgcagattgatttcagaattaagggaagcattatagagaagaggttaaatcatgcgaaaagtaaaactgacaaaggaaaccacaaaggatcttctggaaaaccttctgaagagaagtccaaacaattatggagcctatgaggctgtggtgaaggaaattttagataaggtgaaggtgcagggagatgaggcccttttttcctatacaaaagaatttgacaaggcagatatcaatgcctccaacatcaaggtgacagaagaagagatccaggaggcgtacagccaggtggacccagccctggtggcggtgatcaaaaaggccttggtgaatatccgggagtatcatgaaaagcagcgccagaacagttggttcaacagtacagacaaggggaccctgctgggacagaaaatcacgcccctgtccagagtgggtgtgtacgttccaggcggaaaagcggtatatccttcctctgtgcttatgaatattgttccggccaaggttgccgcagtggaacagattgttatgaccacccctccgggaaaggacggcaaggtgtgtcccaccaccttagtggcagccaaagaagcaggtgcggatgagatctataaggtggggggagcccaggcagtgggagctttggcctatggtacccagagtattcccaaggtggataagattgtaggccctggaaatatttttgtggcacttgccaaaaaggctgtttatggtcatgtgagcattgattccattgccggtcccagcgaaatattagttttggcggatgaaacggccaatccaagattcgtggcagcagatctgctgtcccaggcagagcatgatgagatggcatccgccattttgatcactaccagccaggagctggcagaccaggtggaccgggaggttcagaaatttgtgaaggttctcagtagaagagagatcatccagaaatccctggacaattttggttatattcttttggcagataccatggaggaaggaatagaggcggccaatgccattgcctctgagcatttggagattgtcaccaaaaatccctttgaggtgatgatgaagattaaaaatgcaggtgcgatctttattggagagtattccagcgagcctctgggagattattttgcagggcccaaccatgtgctgcctacaaatggcacggcaaaatttttctcacctctgtccgtggatgattttgtgaaaaaatccagtattgtctattattccagggaggctctgaaggatatccataaggacattatccagtttgccaccagtgagcagctcactgcccacgcaaactccatccaggtacgtttcccggatgaggaagattaagagaaggagtgtcatgggaagagaagcatccattgagcgcaatacaaaggaaacagagatcaaattgaatctaaagctggacggtacggggtattcggatattatgacgggtgtgggcttttttgaccatatgctggacgggtttacccgccacgggctttttgacctgtgtgtgagagtacacggggatttgaaggtggatgaccaccacaccattgaggatacgggaatcgtccttgggacagccatccgggaagctgtgggggacaaaaaaggaatccgcaggtacggaagctgtatcttgcccatggatgaatgcctggtgctgtgtgccgtggacctggggggaagaccgtacttttcctttgagggcgaatttcccacacagaaaataggagatatgtccgcagagatggtcaaagagtttttctatgcagtttcctacagcggggccatgaacctgcatatcaaggttctcacaccgggaaacagccatcatatggcagaggccatgttcaaaagctttgccaaagccctggacagcgccctggcctatgatgaaagaattacggatgtgctttccaccaagggaagccttgcataaaggagatcgaaatgaaagagaagttattgattccctgtctgtatctgcagaagggacaggcagtggcaggtttcggccagagaaatcttttcgattccggagatattctggagctggcaaaattttacactgatcatggagcagatgagttattagtttttgatctgtccggccatgaggatgcagagcacgacgccgccattggaaatatcaagaaaatctgtgaagcctgcgagtgtccggtgatggcggcaggaaatattaaccgtatggaggatgtgaaaaagctcatctacgcaggctgtgccaaggtggccctgaacttttccaaagaaaacaatgtgcgtcttttagaggaggcctctgagcggttcggaaaagagaagctgctgtgctgtatctcggattattctgagtttggggacaatcaggcttatattgaaaaatatgcggcaggcatactggccttagacagtcttcaggagcagatcggggcagtgtcacaggttcctgtgatccttcatacagacttgaacacgaaagagggtctgttggaaaatctgggacagaagtccgtgcagggcttaagcggcaactatgtgagcaggacagatgtggatcttatggattttaaggaagcctgcaaggctgccgggattgcggtaaacacatttgaaagtgccattgcctggtcacagtttaagctgaatgcagacggactgattcctgtaattgtgcaggattataaaacggatgaggtactcatgctggcctatatgaatgaggaagccttccagaatactctacgcactggcagaatgacatactggagccggagccgggaggagctgtgggtgaaggggcttacctccggacatttccaatatgtgaaggctcttaccctggactgcgacaatgataccatactggctaaggtggcccaggtgggtgctgcctgtcatacgggaaataaaacctgctttttccagaaccttatgaaaaaggagtatgatgataccaatcccttaaaagtgttccaggatgtatacgatgtgatcctggacagaaaggtacatccaaaggaaggctcctataccaactatctttttgacaagggaattgacaagatcctgaaaaaggtgggagaggagtgtacggagatcgtcattgcggcaaagaacccggataaagaagaaattaaatatgaaatctctgattttctgtatcatgtgatggtgctcatggcagaaaaaggagtgacctgggaagagatcaccagggagctggcccgccgttaaggctgggtccttccttgatttctggcggtatacagcagttcctttgggggctgctgtttttttctttttaaaagggagaattgggctgggatggagaattccacaggaggttttataaaaattatcatacacaaattaccagcaggacaggtagtaaggaattgtctacagggtatactaaaagaaaatgggtgtgataaggagaaactcatgatccgatatgtgcacaagaaggatattccacaattaatgcaattatggacagaggcatttcaggatgaggatgaatttatggagggctttttcagagagtgctttccttataccgccggaatgtgccaggagcaagggcggcaaattcagtccatgctctacggaatcccctgccgggtgaagggagaagacggcagatttgaaaatgcagtgtatttctatgccctggctacgaaaaaggaattccggggaaaagggctcatgagtgatttaataaaagcagcctgccgggaattcagggagaaaggatacacgtatttttttctgatacctgcacaggaagaacttttttcctattatgagaagctggggtttcacaggctgtgtaccgggaagctggcatatcataccataaatctcaggtacagagaaataaaagctgataaaaagcctgtaccagcggctgtccgtgtacaggaactgtgtcacaagattggggagcggtcctttgatacagataaccgtaccgtatattttccatggcccatccaggaattttatctgaaaacattctttggtacccctccctggaactggtatcttttgaagaagggcagcgaagtgatcggatatttgggaggctggaaagaaaaaaaggatttccggattctctattatgggtattctaagattacctgggaggaattcctggcaggtgtgaaagagctccacacacaaaacattgtgcttgccccctgggatgctgagcagggaagtccctttgaaagacgatatgaaatggcaggcatgggggagcacaagcatgtgtggctgcacggctggattccccgataaaggaaaatacaaggaaaacaacagatcaggagacggaggaaaaacctatgaaccagtttaaaacagttaccctggaggataaagaaattctaagaacctatttaagggaatcaggaaattacagctgtgactgtagtttgggctataattatatatggaactgggaggagcgtctcagttattttttatttgaggacattcttgtgttccgctatctcacccaggacaaggccatctacagaatttccaggtacagtccccggtttgctcatatcctttcgtttatccttaaggattgggaaaaaacaggaaaggagctgctcttatctgtgttggatgaaaagatggtacaggaccttggggaggtgtacccggacaccttcgtcatagagccggacagatcaaactgggattacgtgtatcaggtccaggacctgatctcacttacagggaaaaagtatcatggcaagagaaatcatattaataaattcacaaagagccatcattttatctatgaggtccttaccaaggaaaatattccagagtgtgtggacatggcacggacctggctggacagcagggagcagactggagaacttcttcaggaacgccgggccttgcggctggcctttcagatgtttgaagagctgggactgtctggggctttgatccgggtggaaggccaggtatctgcctttactttgggtgaacccttaaatcaggatacctatgtgacacattttgaaaaagccctggaccaccttccaggtctctatccattgatcaatcagcagtttgcaaaaaatcatttgtttccataccgttatgtaaacagggaagaggatatgggactggaaggcttaaggaaggcaaagctttcttactatccagccttcctggtggaaaaatatacggccagattggtatagcagctcacagcaaatgcccgggaacaggttttatagaccatcccgggcatttgctcattagatctcggttttccacagtccgtgaagattgcagtaggcataggcagcaatggggcggtccccatcagtgagggcaaaggatgcttttggctcctggtctgcctttaaacaaaccctctggtaacccttttctgtctccaggcatacaaagccgatgctgtgctcctgactcatgggatgggcgatgctgcccacacacacggtaacaatgcttccgttttgttcagccacggggagatgtttctccgatgcgccctcggaagtattggctgttatttctttcagctctttgccgttacaggtgagatgaacgtcagagtgtccggaaaatacctccacaatactgtcacattcgtctcccacaaaaaaacgcagttggttcataaatttttcctcctgttaaagtattattccttttgtattattgtcaatttattcatttttatccccctgggtggcttgtaaaaggtctataatttgttaaaattaatttattgtcagaaaaagaaaggaacaggattatggaacttatgggggcactgcctgaaaaaaccgaaatctataaaacatgtttttgcaaaaaatgtggtgaacaaatggaagaagatctgctgaaagaaatagaagcttattggagtacgcgtacagagggatattctcaagtaaaccaaaaggagctgcagggaaaacagagaaaagcatggctgaaagtattagagaaggagtttcccaatagacccaaagaagaaataaaaattctggatattggcaccggaccgggatttttccctataattttggcggaagctggttattatgttgatgcggtggattatacagaaggaatgctggccaaagccagggaaaattccggaaagctttgcagtaaaattaattttcagcgtatggatgctcaaaatcttacctttgaagatgaaacttacgatgttgtgatttccagaaatttaacctggaatcttaagcagcctgataaagcatacagggaatggttccgtgtattgaaaaaaggagggaagatgcttaacttcgatgccaactggtataattatttatatgatgacgaaaagcgggaagcctatgagaacgaccgcagtaatgtagaaaaagaggcatatgaggaccattatctttgtacggatattaacaggatggaaaaaattgcattacaagtgcctttatctgcaatccagcggccaaagtgggatatacaggttattaaaacaattggattttcaagaatccaggtgaacgaagaagtatataaaactgtatggagtatggaggaaaagcttaattaccgctcaacacctatgtttatgatagctgcagtaaaatagaaataatttattttatgatcaaatcaagggttctttccagatccttgattttttctatttcggactttctgacagcctcatcaacggtatttttcataaactgctttacaatggctctgcttgttccggaaacctcagctttgactgcagataactgaatgagaacctcactgcagtctctgccattttccaccatggttttcacggaccgcagatggccggtacatcgggcgatcctatgtataatcgctttgtcataaataggctccgaggccttatttttgtcccccatatcgttgacagcggtaattgttttgttgttaattggattctctttacttaaactatctataaataccatcctcctcatctgggttccatggatagccaagttccgcggctattctttcagcaacggacaaatccaccaaatccgctgcaatgttcaggcacatgtcaatggcagcaatgggactgactgcagtataaaatttcccatcggctgcccatttgcattccggctggcgataaatacctgcagtaaacattctgttccaattcttgtccataggataatcacagatcctgcgcctgaaaagtacaccagtctgtgcaagaagcgaggatccactgcctgtcatcacgcagaaggaggactgctctgctattttcttaagaagttgaaaaaagtgatcatcataacgaataaaacgtctggcacccttaccacccggtatgatcagaatatctccggtgacagattccgtcagataatctgtccatacttgagcaccctgaagactggtgacaacatcaccgtttattgaataatagcttatatggaaatgctccggcattttcccaaatacttcaacaggaccgaaagcgtccaaagaattaaaatcattaaacaaaaacacattaacctgcattggaatttacctttctgaattattatgcatatataagaaaagcagtcatagcggttttataactgcccatcttataggaatttattattgcacatcatgtttgcggaggtatgatatgctattacgagtgaatggcgaaaccgacatgggtcttatgtcgttaatgctagtttaacagataacggaggcattacaagccaccccgggggttaaaatttattttttttaaacaggcttggaacccccgttatattcactctaatagatacgagtacgagaagaatatccttatccccggcatattttatggttttaaacccaagatcaggcaggcttacaagcacaagaaatgtaacaaacatagcagttgaaaaaagtaaaaaaacaacccctacagcgaaagatttccgtggattttaaagagattgatttgagaaccaggaatgtaatggatgagtaaagagaaaaaagattgtgaaaaaatatcccggggggaggcttgtgagagggatttttgcactttataatgtttttataggagtgtgataacgtatagtagcagataggataactgtccggtgaaactgctgtgcacagggatatgatgaaattattcagagcaaacggaataatttacgtcctgctgcatggcttttcttatgggatgtgaacgcttctttacggaatccccgctttttatagtagcagggaataggaagactaggaggaataaaaaatggaaacagcagccggaagagaaaaggaaagtattgttgcttattggagcaaacgttctgaggatttttcaagactcagggaggaagaattaaagagtaataaagcgcagcgttggaaacaggagatcttttcttgtatttctgaggaggataagagtatccggatcttggatgtggggacaggaagtgggtttttcccaattctattggctaaggaaggctatcaaaatgttaccggagtggatctgaccccggctatgatcgcaagggcaagaaaaatggcagagggtatggagtttccaccttctttttatgtgatggatgcagaaaggctgaattttcagaaggaaacctttgatattgttctcaccaggaaccttacctggacactgattcatccggagcgggcttatgaggaatggtaccgtgtgctaaaaaaaggagggatgctgatcaactttgatggggattacggcgaagacgaggagccggaagaggacattcctcaaaaccacgcccacagaagaattgacagtgggcttttaagagagcatgacagaattaaggcctttttgccgggaacctatatgaagcgtccgggggtggatgtggaaatgatgaagacggcaggatttgcaagaatttcggtggatttttgtcttagtgacagagtatacagggagaaggatgaattttataatccggttcctatgtttgccatacaggcaattaaatagaggggtgaaagaagccatggcgaaatatgttttcaggaggctgcttcagctgattcccattcttctggggatcacaattctctcgtttgctctgatgcacaccacagaggctgacgtggtggataaattgtacgagcagcatggtgctgtttcccaggatgtcaaggagaacaccaggaaagaactggggcttgacaaaccaatttatattcagtatcttagctggctgaagggcgtgcttacgggtgatatgggaacctcttatgtctcgggccaaaaggtttttgatacttttgtaagtaaactgccggggacgattcttttaacagtcacatcaattctgttgacgatcctcttatcggttcctttgggaatcctggctgctgtgaagcaaaacagagtcacggattatttgatccgtcttctgagctttataggaaattcgattccgggattttttctctcattgctattaattttaattttttcggtaaagcttggctggcttcccgttattggaaataattctcttgtaagtgtaattcttcctacagtaacgctggcaactgctatggcgtctaaatacacgcggcaagtaagggctacagtgcttgaagaattaaacaaggattatgttttgggagcgcgttccaggggcattcgggagaatgtgattctgtataaaagtgttttaaaatcttccatgttgacgataactacgcttttggcactgtctattggttcccttttaggaggaaccgctatcgtggaatcaatttttatgtgggacggagttggaaaaatggcggtggatgctattttgatgaaggattatcccattattcaggcttatgtagtgtggatggcaatcatctacgtagtggtgaacctggtaacagatcttatgtatcattacctggatccgcgggtaagacttggaggagaagtgtaagacatggaagaattgatcacagtacgcacgagaaaaaccaagaaaaactatactagagtaaagttctgtttttttctggcattgtctcttggattactgctcattgctttattagctccttatcttacaccctatgacccggataagcaggagttgataaatgcattaaagcctcccagcgcagagcactggatggggacagaccgttatggcagggatatgttttcaagggtcatcatgggagcacagtctacaatattttcatcactggctcttgtaaccattatttctgtttttggaactgccgtgggactgttctgcggatatgtaggaggaaaaatggatggctttgtaatgaggatctcagatatttttctggcgtttccaggaatggtattcgcagtagcggtagccggggttctgggaggcggaatcagcaacgcagttgttgcgttggcggctatttcctggcccaaatttgccagaattgccaggagccaggtgctaaccataaaaaattccccatatattgcggcagccagactgatgggctgtggcggggcggaaatagcgctgaagcatgttctgcccaatatattaggccctgtgattgttacggcagctttggatatcggtgttatgatgatggagcttgcaggactttccttcttaggcctgggagcacagccgcctacagctgagtggggttccatgatgagcaacggacggagtatgcttcagacagcgccctgggtgattctggcaccgggctttgctatttttgtttcggttatgatatttaatcttttgggtgataccgtacgtgatgtaatggatcccaggcaaaaggaaagaacctgagtattttaataaaaataaagcgaggagaatacaaatgaaaaaaaagatgttgagagtgctgctttgtgcagctatggcagcttcaataatgccggcagcaaacgtacatgccaaggaatctgtatttaattatggaacgactgcctatggagttgctatggagaatgcgggcatgaatccccatgacagctataagggctggtccacaatccgctatggagtgggggaaaccctgtttcactttagtgaatctatggaactggaaccgtggctggctacagattatgagcaaatagatgactataccgtgaagattaatctgcgtgatgatgtatcattttccaatggaaataagatgaccggtgaagctgtaaaagcctgtctggaagacttgatcactgcacatgaccgcgcaccggttgatctccagattgaggagattactgctgatggccagtctgtgaccataaagtcaaaggaaaaggtaccggcgctgatcaattacctctgtgatccatacggatgtatcattgatatggaggctggcacggatgatccgctgaagatttccggaacgggtccctatgtgctggaaactttcagtgagacagaattgagtctggtaaagaatgaaaattattggggcggagaggtaaaaacagaccgtgtaaatgtgaagagcatcacagatggagataccctgaccatggctatgcaaagcggcgagatcgatgcgactcagggactgccctatgcaagtcttccgttgtttcaggataacccgggctataagataagttctgtaaacacatcccgtacctattttggctttatgaactttcagacacctgcgctccaggatttaaaagtacgccaggccatatccatggggattgataaggaaggcttcaccacagttcttcttaatggaaacggaagcccggcaattggggcttttccggaaaatatgccttttggcggcaataaggttaccgcatatgattatgacccagaagcagcaaagacacttttagctgaagccggctggaaagatacggacggggacggctatgtggataaggacggcgaaaatctgaaaatacgctggctgacctacacctcccgtcaggagctgccgttgttggcggaatctgtgcaggcaacattgaaggatattggaatcgaagtagaagtaaacgctacggataattataatgactttctttccaagggagagtttgacatttatgcaaaggcaatggtgacagctcccactggtgatccccagtatttctttaccacacatttattaaaggagtcggcatataattcgggatcttattataatgacgaaatcgaagcattgataggagaacttcagaatgaatatgacgctgatagaaggacagagcttgcagttgaaattcagcagaagcttctagatgatgccgcatacatatttgcttctcatctgaaaatgtcttttgtaatgaagagcaatattgaaggctttgaagcacatccgtcagattactacgagataaccgcagacctggaagtgaaataggaggagttgagaatggcagcacctctgttggaattgcgccatgtaagcgtgagttatcagggaaaacccgccgttgtggatgtgagtttccaagtgaaaaaaggcgagataatggggattgtaggagagtccggaagcggaaaaagtaccgtcatcaaggctgcaatggggcttttaggtacagaggggtttgtggaccggggagatatttttctggatggaacgccgatacttgagctttcttcagaagaactgcgtaggattcagggagagaaaatgtcaatgatcttccagaatccgggcgcttccatgtgccccatacgtacagtggaggatcagttttttgaaactatgcgtgagcatggaagaacggatatgagaaaatccagagctgaaattttagatttatttcaaaagcttaaccttacagacggtgaaagagttttaaagagctatccctttgagctgtccggtggtatgaaccagagggttggaatggcactggcaatgcttctcaagccctccctgctatgggcagatgaacccaccagcgcccttgatgttactgtgcaggcacaggcggtaaaagaaatgatgaaaatgcgtgatttattcggtacagctattgtcatagtcacccataacattggtcttgtttcctatatggctgacaatattttggtaatgtatcaggggaaagcagtagagtacggctctgccagggaggtggttctgcatccccggcatgactataccaaaggcctgattcagtccgtgccgaagcttcaaagaaggggacactcatgagtaatatattagaagtccatgatcttgttaaaacctttcataaaggtaaaaatgtttttcaggcagtagagaatgtaagcttcagcatcagggagggccaatgctttggtcttgtgggggaaagcggctgtggtaaaagcacgattgcaaaaatgattacttttttggaaaagccggacagcggagagatttttctggacggagaaaatgtcacaaattattctgggagggatagaaaaaaatgttatcagaaaatgcagatggtttttcagatgcctgcggattcttttaaccccagaatgcgtcttggcagttccattatggagcctatgcttcataatggatatcccagggcaaaagccagggagcggatgtatgagcttcttgaaaccgttggacttggcagggagtatgctcagcgttatccccatcaggtgagcggaggccagtgccaaagagcggcgattgcccgggcagtgagcgtgaatccgaaattattgatctgtgacgaggcaaccagtgcgctggacgtgtccgttcaagctcaggtgatcaagcttctggacatgttaaaaagggagatgaatctgtcaatcctcatgatctgtcatgatctggctttggttcagcagttctgtgattatgtggcagttatgaaggacggatgcctgattgagcaggggactgcggaccaaataattgaggaaagtaccaatgcttatacccggctgttggtggattccgtttttccgatagaccctgacagtgggtggagaatccccgaataggggcacacaattggcggtgctataaccgtgacttacaaagatgaattaggaatatttcaaaaaaagtgcagaagtgagatgcgaagaaatagagtaaagagttattgtatactgaatttagtattcttttcggaagcatattgacattttgtgatactattcctataataaatttagaaaacagaaatgtaacatacaggtgtcctatggggcggcaggtctgccggccccatggatgaaaagggaatccggtgtgaatccggagcgatgctgtcactgtgtacgggagcttcttttataagccactggcatatgccgggaaggaagagaagcgatgaacgaagccaggagacctgcctgtatgtagaatgtatgatttgcagtccacgaatcaatattctgacattgtatcgctcctgaacatgttttatgcggtttttatcatccggcatattatttgtgatactcaggatcctgcattggcagtcgtggaagcacggctgttttcttttacccatttttaatcctaaggaggaatcaagctatgaaaaaacaaatcgtagtatcactagcagccctgatgacactgacgacagccgtcagcacagctgccgcagcagaagaaccacatgatccggtcacaatctctacctacaattatgaaaaagaacctatagaggtgactttcgagtccgtaccgcagaaggtggtgtgtaccaatcagacccagacagagcttatgctctattttggtcttgatgcccacatcgcaggcgtttcctatctggacggtacagtgagggaggatctgttggatcagtatactgctcttgtggaggcgggcaaggaactgaataagaaaggctatccggacaaagaaacagtacttgcccttgagccagacatgatctttggctggaggagtgcttttgcagacgatgtgctgggcaatgtgaatgagtggaatgacctgggcatcggcacaatgatcctgcgttgctccaataatacggcggaggagctgaatatcaattctgtgcttgcggatattgaagatataggcgcaattttccatattgaagataagacagatgcctacattgcggatgcccatgcaatgcttgacaaggtccaggaaaaagtaagcagcctggagtctccgctgaatgtgctgatcatggaggggacaggcgagggaatctggtacgcctggggtgccaactgcctgaccgggtcactggtggaggctgccggcggggtcaacctgagtgcagaaggcggcgagctgtccgttgaggatatcatcaattacaatccggatgtcattattgtggattatatggatgacatgacagcggatgacggcggtgtggccgcggccgctgctgctatcgaggcggtgaaaagtgagggtgctctgtccgaggttcccgcagttgcaaatgaccgcattatggcagtgaatttgacggatgtttatggcggaggcatccgcatggtaccatccgtggaggcaatgtatgagttcatgtatggaaaataaaccgtatccttccttgtacggtaaagtccgggaacggtggatccttcagactgatctgcaggtccactgtattatggcagacagtgccggggaaaggaaataccatgaatagtcgtcttggccggaggcatgtcctgatgcggtttgtcattctgggatttgtcggtctgcttgttttttcagttttacttgcagtatgcattggttctgtaaaaatatctttttatgatgtgtaccgcattatactttaccaggtgacacacattaaggtgggtgaccctgaggttctggccagcggcactttgtttgagattgtctggaatgtccgcctgccccgtgtcctcatgggggctgtgatcggaatactgctgtctgtctgcggtgtagtcatgcaggcgaccgtacagaacccccttgcggatccatacatacttggcatctcatccggcgcatctttaggagctaccttctcgatcatgatcggtgcctcaactgtctttaccggagtgctggcaggaactggaactacattttgggcgttccttggctcccttggggctacggcactggttatgctgctttccaatcttggcggcggaagagtgacctcagcgaagcttgtgctggcaggaagtgtcatcgcaagtctttgcggctcctttacaaacatgatgatctatattggaaatgatgcggacaacatgaaaacagtgacttactggctgctgggtagtatggtgtctgcccgctggaataagctccttctccctgggatttgtatgatagcaggcgttctgttcttcataacccagatgcgtacgttgaacacgctgcttctaggtgaagaggctgcaatcacactgggaatcaatctggctttgtggcggaaggtctatatggtctttacttcactgctgacagcggtggcagtgtgtacctgcggcatcgtgggctttgtgggcctgatgattccccatattgtgcgaggttttgcaggctctgaccatcgctatctgcttccactttcagccctttccggcggtgtctttctaatctgggccgatgtggtggcacggattttaatcaacaataccgagatccccatcggagtcataacttcggcggtgggtgcacccatctttgtctacatgatggtgaaaaaatcctatggcttcggcggagggcagaattcatgaatttaaaaacaaaagatgttgaagtcaccctttccaaaaaagaaattgtaaaaaaagtgtcaatccaggtgaaaaagaatgaatttgtcggactgcttgggccaaacggaagcggaaagaccaccttgctcaaaagcatttaccgggtattgaaaccgtctgctggtcttgtattgttagacggggaggatatgaaaaaaatgaattaccgggataccgcacggcgccttggagttgtcagccagtttacaaatatgagttttgatttttcagtggaggaggtggtgctcatgggccgtgcgccccataaaaaagctatgtcacaggacacaaaggaggactaccaaattgtggaggaggctctgcgtacagtggacatgctgagcttccgtgaccgcagcttccagaccctctccggcggggagaagcaacgcatattgcttgcgcgcacactggctcagcaggtggagctgctggtcctggatgaacccaccaaccatttggacattaaatatcagattcagattatggatgtggtaaagtctctgggcacaggtgtgctcgccgccctccacgatctgaatctgaccttgatgtactgtacctatgtgtatattttgaaggacggaagggtgattgcggacggacatccggaggatattatcacttcccggctgatcaaggaggtgtatgaggtagactgtgaagtacttcggcatccaaagaccggaaaactatatgtcatgtacttttccaatgcggggtaatgcacagaagattgaataatgggattattgaaggatgaattttatccatatgccctggccaatatttttatatggccggggctttctcttgtctgttcctgaattataaaaaataattgcaagtgcctgcttttaagtataatttctcctggaaattaagatactaatttagaaaaaacaggatggataaggagagtaagcatgagtgatgaaataaagcttccttgtgtcaatgaggaaggatgctatgaaatacgcctggagagcatcggcggcctgggcgccaacctgtgcggaaagctgttgggagagctgggcgcctcttatctgggcctgaatgcctccagcttttccagctacggctcagagaaaagaggttcaccggtgaaagccttcgtccgctggtgcgccccggatcaggagatccgcatcagcagtcctgtggaaaagccccatattctgggcttattccacgaagccctggcgggaaagctcccggtgaccgcaggagtccaggaggatacaaagattgtgatcaattctccggaggatgccagaaccctgagggatcatttaaagctgtggggcggttgtatctatgccgttgacgccttgaagatcgccatggagagcaagagccgcatcaacatggtcatgctgggagccattacaaaggcctccggctttatacctttggataaggtttttcagttagtggaagccactctgggaaaaaaatacccttctcttctggaacgaaatctggaaggtgttcagagaggctatgatgctgcccaggaagttgcctttgctccccatggaaaatatgacaaggtggaatatcaggagccgcagaattcctggggctacgaaaatgcccccattggaggtgtaaatccccgtttcggaagtacagtatccaatgatctgtctgcctcacgggagggctatatcccgctgttcattcaggagcgctgtatcaactgcggcctgtgtgacaccacctgcccggacatggtttttcagtttaagaaaggaatctacaagggcaaggaggccatggtgaatcagggtctggattatcaccactgcaagggctgtctgcgctgtgtggatgtatgtccggtgaatgctctggtccagggactggagagagagcatcccaagaaggaatggtttgtgagaaacaaggatctgatcgtggaccatctggaattcgaggatgtgggagccaactcctgggtgacaagcgactcctatttggaagaacgtagaatagacggaggacttgtgtgatggaaaaacagaaacttttatttgaaagcgggaatgaactggcttcctatgctgccaagcagatcaattaccatgtgatgggctattatcccattacaccctccacacagattgcagaatttctggacttaatgaaggcagagggagagcatgatatttctcttattgcagcagaaggggagcacagtgctgcgggaatctgctatggcgccgcctccacaggggccagggtgtttaacgccaccagtgccaatgggcttttgtacgccctggaacagcttcccgtacagtcaggcacccgccttcccatggtattgaatattgcctgccggacagtgtccggacctctgtctattaagggagaccacagtgatgtgatgtacactttaaatactggatggatcattctgtttgcccatacgccccaggctgtctatgacatgaacctgtgtgccttgaaaattgcagaggcagtaaagcttccggtgattgtggcctttgacggatttttcaccagccatcagaagaaaaaatgctatgtgttcgaagaggacaagactgtccaaaggttcctgggagaatacaaagcgccctattcccttctggatctggaaaacccggtctctatcggctcctacatgaatgagccggatatcctcaacaacaagttccagctgcacctggcaatggaaaatgcaagaaaaatcattcctcaggtatttcaggaatatgagcagttatccggcagaaattacgccatggccgaaggataccgcaatgaggatgcccaaatccttctgtttttacttggctcctcctaccacactgccaaatccgcagcagaccagctgcgcaagcagggaatccgggcaggcgttgtcaccctgcacactcttcgtccattccctgccggggaactgtatgagctttgcaaaaacgcagataccatcctggtgggagacagacaggacagctatggggcaaagggaggcaatatgaccctggagctgaaggcggccctgaaggaccacaacagccaggccagaattctcagccgcgtctatggcctgggaggcagagacttttatctggatgacgccctggaattattccgggaatgtatggatgaagaggctccggcatttgcctatcacggagtctatccaggagagaaggatctgaagcttcatcagtatttccggcccattacccaggaagaagccacccccggctatattacctgtgaacagtcccaggaggatggcaaggtgaagataaaaggggcaagggtgaacgaaagcaccgccatgcccaagcgccttgcaccaggccacggcgcctgccccggctgtggaatacccgtgaatgtgaatctgcttttaaagggaatacagggaaacgtggtgcttctgttccaaaccggctgtggtatggtggtgaccacctcttaccccaagactgccttccgggttccttatatccacaaccttttccagaatggtgccgccaccttggcaggggtggtggaagcctgccagcagaagcgtagaaggggggagattcctgatgaacccatcacctttatcatggtcagcggtgacgggggactggatattggcatgggctcagctcttggaaccgctcttcgcaatgaccatctgattatttttgaatatgacaacggcgggtatatgaatactggttatcagttgtcctattccacgccgaaaggggccaagagctccacctcccatctgggacccaagcagtatggcaagacctttttccataaggatatgcctcagatcatggcagccaccaaccttccctatgtggccacggtggcagaatccaatcctccggattttctgaaaaaggccgccaaggctcaatactatgcacaacagtatggaaccgcttatttaaaggccctgtctgcctgcccgctgaactggggagacaagccaaacacagagcgcagggtcattgcctcagccgtggactgctgttatttcccgctgtatgaaattgagaatggaatcacctctctcacctacaatccggaaaagaaagataagaaaatcccagtttccaactggcttgcccagatgggcagaacccgtcatctgacagaaccagattatgcccaggtgacgcagatgatccaggaggaagtggaccggcggtgggagcgcttgaaagcaagggcggagaatcccctgttgtaacggttataaaaaataaaagtgccttttccagttattaataaaatgactggagaagggcacttttttattacataggattaaggtgtcaaaagccatatttaaaagatctgatcttaaattgtaccttgaaaatttaacacgatttgcgcttattgaaaaaagaaaaggataggatttggtgattcgcggatattctggccccacttttatgccgtttttgtttttgaggcatgcttatctaagccgttagtataatccaacagcttttggaaatttagtgcggctattttgaatccgaaataaaagcgcgtctccttcttgccatgagcaggtattttatccacatgatatttcctacgcagcaatgacgggatcgcctctacaccatttcggaaatttgacaattcatgaaattcctccgttttcatgtaacgcagcatttttgcacggttcacagttttccaagagatctcttttagcgcacttgatttcttaaaccttgggttacactgttccctgtatggacaattcatacagtcttctctggaaaaactggcgttgcaccggtcgttgtgctcatcgtaatacgtgtagatcggttttttatgagcagcgcattccagaacgatcctcccagtctcgtcaaactggaattccgcaaggatatccgcgggtttataccccgtaaaattcgtggtcacaagccggatgttatgttcctttgctttggaaatgttggcctcgccactgtatgctccgtccgcggtcataatcactggggtctcgtaaacgggtgccgcttccagatggtcctttaaaaactggctgtcactataaacgttctgctcataggcataatccgtcaccagactgccgttttcgccaacactttctgttatgttcccaacataacccagatgttttttccccgcctttttgcggaaggtagcctccgcatccaccggactgagcagcacccttgacgggtctttcacctcttctttgtcccggagtctgcgggagccatcgccatccaggatcgtgcgctccctcagcagacggatcagcagctggtattcacttgtgtcatcaaaatcgccatttctgtcacaaagctcgatcaatttttctgcgtcatgcatgaccatgacggtcctttgcgtggcgtcctggtttctctggtgatagataaaacgattatagtcatccttctgggtatagtgccgtaccgcttcaggaagttttgtgtgccgccgctccataattttggcaaggttggccacgcaggtatagaacagttccaacagggaaagatttcggatatttgctgcgaccataagactgtccattcgctgcatattgggcgtgatccccataaattccgagatctcctttgccatttttgtgacacacgcatggatcagatcgatccctgtttctgtttcataagcgaggcaccgagcacggaaacggcttaaagtacggtcactgaggggctgttcctcaaaactggtggtgtggagggcatactgatagcggatatcaaacatcaacgcctgaaccagctcgtcatcggtatcacccaatgcttccttgagtattaatgctccaacgatcacatttacaggagtattcgggcgggaagccttgtcactgtaaagcacagaaaaaatatcctcgtcaatagctgggaaaacgctgtcggcaaaagttttggcccatgatcgttccagaaaacgttgttcccgttctgtcagctggaatatactgtctttcaatgtcatctgctgaatattgttggcaacaaaagccatagagatcacctcacatcttgatataagaattatatcaaaaaatgtacaaaatctaaatatcgtgttaagttttcaaggtacaaatttatatcaaaggtcattgaccttttgacaccttaatctacataggaaagttctctgaacttttctatgtaataaaaaccctccgggggatgcacacaatgtgcaaaggaaagctgctttgcagctgcacattggcgcacaaagctgccaagcccctcatgagtgaggggcgggggagttgaagtgggcttgcccgttttgttcttacagttgaaacggacttacccgctttgttatacgatggatcatttgatgagacctaagatgccggggatttcctggaggaagggaaaatggaagtgaattggtacttgaaaaataacgattatgtggtagaatgagactaagatactataaataagtagttgagagatgtgtaccataaggatgtatggagacatatattttgacaatagaagccaggcggataatttgtgattcgccgttttatttacgaatatattagcactcacttaactagactgctgataaaaaaggaggatgtaacgtgtatacaattccgatttatgatatgttgattctgcctggggtaaccttttatttcaaaaacgacaattttcccgagacggcagaaaagcccctgaagcctggggatgatgtgctttttttaatgctcacagaggataagcccaggaacgaactgactcctgacgatttctattccattgctgtggccgctaaggcggagaaggtggatgaggaaggcaatatctggattcatgctttacaaagagtggagcttcagaacatggccatcagccaggatgatattgtagcctccgtgggcccttgccccgaggagctggatcttactcaggaggagataaaggagaaatttgagaaaatgaaaacctcccttctgaattttgtaaagggctttcagtggggcgtgtgggccagagggtttattgtccactggaaaaatgtgagcgagatcgcctgcggtctttctggctatatgaatcttagctgggaagaaaaatacgagattgtcaacacagactctctcaaggagagatatgcccttattgaaaaggctgtgtatgagtttattgaaatgtccaggatcagccaggaggcagagacggcccagaaggaaaccagtgagctggtctaccgggaagctgctatcaaaaagcagattgattttcttcagaaccagctggatgccatgcatccggaaaatgtatcagatatccgccgttttgagacaaagctcaaagcatccgggatgaatccggaggccagaaaagaggcagataaggtcctgaaccggatgaagcaggagggaaaggacagccacgaatatggtctgctctatgattatctggactttgtcacaagcctttcctggaaaaatgaagaattcaaggagattgacctttccaaggcagaggaaatcctggatgagcagcactatggcttgaaaaaggtgaaggagcggatcatccagcaggttgcagtgatggccttaaacaaaaaacaggcaggctctattcttctgtttgtgggagcccccggaacgggcaagaccagcctgggccagagcatagccaaggccctgaaccgaaaatatgtgagaatcagtctgggcggtgtccgggatgaggcagagatccgggggcacagaagaacctatgtgggagccatgcctggaaggatcatggagggcatgaaacgaagcggcgttcagaatccggtcatggtgctggacgaggtggataagctggccagagatttcagtggagacccggcaagcgctcttttagaggtgctggatccagaacagaacaatacttttacggaccattacatgaatgttccctatgatctgtccaatgtgttttttgtatgtactgccaataccatggataccatcccggaaccattgctgaaccgtatggaggtgatccagtttcctggctacacggcggtggagaagtttcacattgccagaaaacatctcctgccaaaggccatgaagactatggggatcaaggcgcagaatctgaaggtgaccgatgaggccatccgaaagattatcgaagactataccatggaggccggtgtccggggactgaaaaagcagatggacgttctatgccgctgtgcggctgtgaagctggtgaagggagagcagaagagtatcacagtgagtgagaagcggctgcgggagtttcttggaaggaatccccttcagcgagagcatattttggaggagagtattcccggagtggttacaggtctggcctggacacaggcaggaggagagattctctttgtggagacctctcttatcaagggcagcggcgaggtggtgatcacaggccagctgggagatgtgatgaaggaatctgcccagatcgccgtaagccttgtgaaggttatgtttccggaggaggccaaaaagctggcagaggacgatctgcatatccatgttccttccggtgctgtgccaaaagacgggccctccgcaggaattaccctggtgactgctttggcctccctggtgacgggaagaggcgtgagcccggaatatgctatgaccggagaggtctctttaagaggcggggtcatgcctatcggaggtcttcccgagaagcttatggctgcccagagggccggtgtaggtaaggtgttcataccttatgaaaatgtggatgatctggaggaagtggcagatgaggtcaaggaaaagctggagatcattcctgtaaaaacagtgaaagaggtgctgaagaagacgcagatcataaaataaagggcttcccttttgtcctgaaattgtataaaataaaaggtgaaaaggaattctgtaaagacaggattccccgcctgggatagaccacattggcggaaacattcattttttaccggacttacagggaaggagagagagtatgaaaaagagagtgcaggtcctcctgcttggtctgatgctgcttcttaccatgggaggcgtaccggcctgggctggtgcggagttttcagacggaggttttatggaggagcctctgatgggagatttgtttgcccaggaagatgaacgtcttacccaggaggaccaggaacccccagaagggattgaagaggagccggaggtttactctgcagcggcaggatccggggagattaatcccagagtggatgctgcccagtcttttttctgtaaagggtataaaaagggggttctcctggcaggagccaaatttcccaaaaaagtaaagagctccaacaactattattatctggtgaaggtgaatcccatcaatggaaaaatcctggggtctgctggtgcaaaggcggtgaaaagcagcagtgtgcggttccaggttaatatttcaggaaagccggagctggctgtggccagatactgtattgcagtgttcgtgaacagaaaatatgtaagggtgagttccatccgctatctgaccagcccggaaaatatggcgtccaacaccagagcttatgcggtgggaggctcgaaaaaaggactgcagaccacagacttttctcaaattgtgaataccaactccaagcatatttttgtgaacattcccatctctgtggtggtgaacagaagtgcggagagcgtgccctacagatacaatggaaaaacctactatttcagctatattggaggctaccagtccttggtgcgcatgtgcaaccaaaggaaggtggtggtcactgcccagcttcttcttgactggtgtgattcctccctcatcgccccacaggcccgggtgggaggacacagctactatacctggaacaccagacagtacgtgcccagacagaagatggaagcgttattttctttcctggcagagatgtttggtcaaaaagactgctatatatccaactggattttgggaaatgaagtaaattcctgccagtattggaattatgcaggaagtctgtcaaagtccgggtacataacggtttacagcgaggccttccgaagcttgtataatgcagtgagaagccaggcggccaattccaaagtgtttatctgtctggatcattgctggagcttcgcccaggcaggatattcagccaaggatttcatggacagctttgcccaaaagatcaaaagcctgcagtcgggggtccagtggaatgtggcttaccacgcttatcccagtccccttaccaatgcggccttctggaataacaccaataccaccaacagtctgagtaccccagtgatcaatatgaaaaacctgtcggttctcaccaactatgtgaagaacacctatggcaaaaagaccagggttcttctgtccgagcagggctttacctccgcccagggccaggccacacaggctgccgccatttctctggcctactatatcgccgcctgcaatcccatggtggatggttttattatccgaagctatgtggatgaaccgatcgaggtggctcagggattgagcatgggtattaagggcaaggccgccttttccgtatttaaatatatggacagcagccagaccatccgctataccaataaatatctccctgtgatcggtatcagcagctggaagcagatggtgcccaattattcatctgcccggcttaccagaacctatcgggtggaataaagcagagatccccctgcatttcatatttgataaatggagacagaaaacacatgaggaagaaacagagaaaacgcagaagaaagacagccgcttttttctttatgcttgctgtgggaatggtctattccgcttttccctcagagatcaatgaattgctgggaagcttccgggacagtccggaaagtgtatccatagaagaaatcccggaatataccggggaaccttatatagaggtgaacggaaatataccggattttcaggaagaggattttacagtacagtcctatgaattctacagcaatctggattatctgggaaggtgcgggaagacctttgccaatgtggggattgaccttatgcctacagaagaaagaggagagatcggccaggtgcgccctaccgggtggcataccatcaaatacgacaatattgacggaagatatctctacaaccgctgtcaccttattggctatcagctgtccggggagaattccaatgagagaaatctgatcacaggcacccggtatatgaacgtgcaggggatgcttccatttgaaaaccaggtggcggattatgtgagaaataccggcaaccatgtgctgtaccgggtgacgcctgtttttcaggggagcgatctggtggcctcaggggtgcggatggaggcagaatctgtggaggacagaggggatgccatccgtttccacgtgtttgtttacaacgtccagccggggatcaccattgattatgcaacaggagagagctggccttctcagactgagatacaggaacacaaggagccctggtatgaggatgtgacagataaaatccaggagctttggcaggacattcaagacctggcagcgtaggaaggcccggaaccctttcttttgtggaaaaaggatgttaaagaaataacaaaagttgctattttatctgtgagcatttatgatgatagtatacaattgatgcagcagaaacagacagcaggattccacaccgaagaaaggaagggattcatatggcgggaaagctggaaaaaccattattgttacttgacaacagcaatatgatgtcagtgttgaacaaaggagagttcaaatgcagcaatctgacctttgaggaagcaaaggcgattattgacatgtataacgaggaggagatcctccggtgctttacagacgctgacatagaaaccgttattttcgactatcttggaattcagaagagaaactttgcatttaagaagattcggaacatgagagaaggccaggatgccattgtatttaagctttatgtgacaccgtcagagacacagccggtaatccaggcggatgacggagtggaagcaaagaaaatacagaatgtgtatgtttactgccagcacgtgacacgtatcaaataaaccttagaacgatagaggcgcttaagcaaaaggctcaggcgcctttttctataggagggacaagataaggggagggaaatggaaaggattacagaaaacagtctcaatctttttgcagagccagtggcccagtggtttaaaagctctttcggaaagcctacaaaggtacagcaggaggcttggccggccattgtctcagaacatccggtgttgatcagtgcgcctacaggaacggggaaaaccttgtctgcgtttttggtgtttattgaccgtttgtaccgactggcggcaaagggagaactgaaggaagagttatatgtgatttatatatcaccgttaaaatcattggcaggggatatccgtgaaaacctgaaaaagcccttggatggaattgcccaaaggcctcagggggcctatgcagagtctataactgtggggatccgcacgggggatacgccttcgaaggaccggcagagaatggtaaagcaccctccccatattttgatcaccacgccggaatccctgtttcttatgcttaccagccagtctggacgttcggtgctgcacacagccagggcgctgatcattgatgagcttcatgccttaattgataccaaaaggggagcccatctcatgctctgtgccgcaaggctggatttcctgtgtcccagaccgcttcagcgcattggtctgtctgctaccatcgagcccctggaaatggcggcggagtatctttctcctgaaccagcggtgatggcggcgccgcctatggagaagcaggtacaaattcaagttcagggcatcacgccaacaaagggcagacgaagagaccctgtctgggaggatctggccaaaaaggtatatgacaaatgtctatcctgccggagtgtcattgcattttcagagtcccgcaggtatgcggagaagctggcctattatgtaaatcagctgggaggagaggggtttgccagagtccatcatggaagcatgtccaaggaacaaagggctctggctgaggacgctttaaggcaggggcgtctgcgtcttttgtgcgccacctcctccatggagctggggattgatgtgggagagattgaccaagttcttcaggtgggatgcccaaggacggtgtccagtaccatgcagcgtctgggaagggcaggtcacaaccctggacggaccagctttatgtatatgtatccccgcacggcgccggaaaccttgttttgcggcatgactgctcaggcagccagggaaggaggagtagagcatgcccggcctcccaggctgtgtctggatgttctggctcagcatttggtgtccatggcagcagttcctaagggtagtctgcctggaaaagcgaaaaaagccagggcaaaggaagagggggaagcgtcacagacaggggttgcttatactgtggatgaggtattggagatcctgaagcgaacctattcttttcgtgatgttgccagacaggacgtaaaagatcttctggggatgctggcaggagattatgaacacagcagagaaattcctgtacgtccccgtgttttgtacgacagaatccatgacagagtatttgctgatacttacagccggatgttgtctgtggctgcaggaggcaccattccagataaggggctttatactgcaaagacagaggatggggtgaaggtgggagaattagacgaggaattcgtgtacgaatcctatctgggagatcgttttctcttgggcgcttttgcatggaagatcgtaggacaggacaaggatactgtggtggtaacccaggcttcggcagcaggcgccagacttcccttctggaagggcgaagcgggagggcgtgacctggccaccagcctcttctttggaaaaatcatgaggcagcttgcaaaaaaggaagcagaaggaatgctggagcaggcgttggagaacttgggattggatccggcagcccgggaaaatacagccgatttcttgcgcaggcaactggaggcagaccaggtgctgccggatgaccggaccattgtggtagaacattttgtggattcctctggcagccatcaggccatgattcatgctatgctgggaaaaagagtaaatgcacccttatctttacttctacagtatactgcccagaaaattactggcgtcaatgtgggatgtgtggatgaggaggatgggattttgctgtattcctatggagaagaccggattccggagaacctgctgttttccatagacataggtaaggcggaacagcttttggaggcgatgcttccggccacccctgtatttagtatgaattttcgttacaatgctgccagggcacttatgatggggatgcatcagaataaaaggcagcccttatggatgcagagacttagaagcacccagatgctggagtctgtgctcaaggaggaaaatcaccctctcataagagagacgaaacgagagtgcctggaagaccaatgggatctggaaggacttttgaaaatattaaacagcctgaagtgtggacagatcaccgtccgggagctgtatgtggaagtgccctctcctttgtccctgcctatgcagtggaagctggaggcggaggaaatgtacgagtatacgccttccacgccgggaatccgtcaggcagtccatgaggagatcagccagctggagcagctcaggccctctgcccaggctctggaaatggtacaggagcgcaagaaggttccagggaatgggacagagctgcacagttttttaatgatggaaggagacgtgactgtttgggaacttcaggctatgtaccttcaagacagtaaggaaggcagggaagaacaggtctgtgtatggctggaggagctggcccaagaaaatctggccaaatacgtggagcctggcctttggattgctgcagagcatatacaggaatatcaggcggcccttgaagacaaggatagagaggcaggaaaacatattgtgcgcaggatgctgtattaccgggggcctcacacctatgagcagatacaggagcggtaccttccaggggaaacagatctcctttcgtggctggaggatttgtgcgccaataaggagattgtgtgccaggaagacctgtattatcacggaaagctgtatgaccgggccagaagagcaacaatccgcactctgcgccaggaggctgttaccaggcctcctgagaactatgccgccctgctggcagagcgtgttttgataaatgcatctcctttggaacagcttagggaagcacttgggcagctgcagggccagaagtttccagcagctctatgggaatcagtgatccttccaaggcgggtgacaaaatatcgagaggggcttttggataaggtcttggcagaaggggaatatttctggaaattgggcccagatggcagcctttgtttttattcttatgagaatatcaactggcaggaggacctggacttaaaacagctttctttagggctgtcccaagaagaggaggcggtatatcaggagctgacaagaagaggagccagctttatgaaggccctgaccggaatttttaaaacagaggatgtgagaagcattttgctaagtctggcagaaaaaggactggtctgcgcagacagcttcgttccggtaagacaatggcttaataaggataagattaagaaagcctctcccagacagcgggtaaatgtaagagtggcagccatgtccgccggacggtgggatgtggtgcaccccttggtggagcctgccatggatcagcttctggaggagctgttcctggaaaataaaattttgtgcagggagaccttccgcagatccatgtccatgcatgaggaccttccgtggaataggggcaaggactgggcacaggcattggagatgcttcgtatctgggagtttaccggccgggtgcgaagagggtattttgtaaaaggcctttcgggagctcagttcatccgaagagaagagtacgaagggatgatacaggctctggctctgccaaaggatcagattctgtggctgaacggggcagatcctgctcagccctggggaaagcttttggagcacagggagggcagcagctttttaaatgtgccgggaacagcagtggctctccaggggggaatcccggttatgattctggaacgccagggaaagattctgcggctgttggaatccgtagatccggaaccagtgcttctggaatttgccgcagccttccgacagaaggtgattttcagtgaaaaaaacaggattatggtcaaagaattcccaccagaaacagcggatgccttgaaagctgccgggtttatcaaagagatggtggcttatgtgttgtatagatgaaggcaaaataagaaagataggagaaaaataatgggatatttaggagaaaatataaaaaagctgggctttggccttatgcgtctgcctatgaatggcaaggaatttgaccttgaacaggtgaagagcatggtggatacatttttagaagcaggcttcacttattttgatactgcctgggcctatgagggtagtgaggaagctgccagaaagacactggtggagcgccacccaagggaaagcttccagcttgccacaaagatcgccccctggattgactgtaagacaagggaggatgcggtacggcagtttgaggaatccttgaagaacacaggggcaggatattttgacttctatcttcttcataatgtgggagaatataagacaaaattttttgatgagtttgatatctggaattttgcattggaaaagaaggcagaaggattggtgaagcatgtgggcttttcctttcattctaccccccaagagctggaggaaatcttgaacaagcatccggaaatggaatttgtgcagcttcagatcaactatgcagactgggaaaatcctgcggtacagtcaagagcctgttatgagatggccaggaaatatgataagccagtgatcattatggaaccggttaagggaggaatgctcgcaactcctccggatcccgtggctgagattttcgagaaggcagatccaaaggcctccaatgcctcctgggctattcgctttgcggcggatttagagggtgtgatcaccgttttatcgggtatgagcaatatggagcagctggaggataacctgtcttatatgaagaatttcgctcctttgtcccaggaggaaaaaagagttcttgtggaggcacaggaggcaatgaggaaaattcccttaattccttgtacctcctgcaattactgcgccaaggtgtgcccggaaaacattgggatttctggttcctttacagccatgaattatctgactctctatggaaacaaagccgctgccctgcaccaggaggaatggctggtccaaaagccaggaaagaagcaggcggatgcctgcatccggtgcggcgaatgtgaacaggtctgcccccagcacattgagataagaaaggagctgggtaaagttgccacagagctgcttggaaaagcagattgagcgacaggaatggataggttgtcaagaaataaggccatgagacagggagaagaacaatatggacaatcagaaggtttatggaatgagctttgcaaaaatatatccgctgctggtgtctaaggcggaaaagaagggcagaactttggaagaagtagatgaagtgatctgctggctcacgggatataatagagaagatatcaagaatgccataagtaattctgtcacatatggagattttttccaaaatgccccgcatttgaatcccaacagaaaacttattaaagggactgtctgcggggtacgtgtggaaatgatcaaagaaccgctgatgcaggaaatcaggtacctggacaagctggtggacgaagtggcaaaggggaagccaatggaaaagattctgcggagggaagaaggttctgtgtcaggttgaaaattggcttcctgattgtaaaacttaagttgttatggtatgatacaggtaacagaaaaggacatttgcttaacagttgcatataataaaggtggtgaatcctttgggagtaaaagatacagtaacgactaaatatatgagacacaacgaaatctttgcggatgcgtttaactattttgtgtatggcggtgaacaggttatatacccgaaaagactgaaggaactggatacccgtgagatagatgttccttatggcggggaccagagtgccggccagccagtacaaaaaacaagagatatcataaaatctgtggttgcgatgatggataaaaataccgcatacctgcttctggcaatcgaaaaccagtcatatattcattacgcgatgccagtaaaaaatatggtttatgatgcgctccaatatgccaagcaggtgggggatgccatagcttcccatagattgtccggtgattataaaggtgtcggcactgacgaatatctgtctggttttatgaaagaagatcacttattgccggtggtgacattggttgtatatttcgattcgaaagagtgggatggtccgttatctgttcatgaaatgttttctgggcaagatgcaagggtgcttgcactggttccggattacaaagtcaatttgatcgcaccggcttccataaaggaggatgattttggaaaattccagagttctttaaaagaagtgctgtcatttatcaaatatgcaagtgataaggatgaattgaaaaaggtattggatgcagacaaagctttccgccatttggggagagaggaagtggatgtattaaatgcctgcgtaggtgcaaagatagcagtcaaagaaggtgaggaggcgattgatgtgtgtttggccatacaacaaatgaatgaggaagcggctcagaaagaaagagtatcaactttactgcaatcaattaaaaatctcatggataatttagggctgacggcagaacaggcaatgaatgcgatgggcgtttctgaaacagaccgcaaaagcatattaccatttatttaagatacgggtaggaaaatagtgaacggtatttatcatttgggatagataccgttcttttttggggggatcttatttctggaaggggagagcaggtcaacctgatagagatttttcctgtggcacatacccacggatgattgcttcagatgccggagataaccttctgtctggaacatcttcaccgaattcggatcacaaagccaatctgtgtgtagctgccttcctcactgtcaatttccagctggacctgatttggatatagcagggtcagacggcgatatacatttcgcaggccgatgcagtctgtgagttcctctggggcgtttccctggatataccggtgaatctcggcctgacgttttggggaaatcccctggccgtcatcccaggtaaatagcctgagaaacgggccatccacctcggcggtataacggatatagccttgcttacggctggccaggccatgacagtaggcattctccatcagaggctggagcgtcagtgcaggaatgatcagccattcggcatccggatctatgaagccttctgctttgatccggtcgccaaagcgcagatcctggatctgggtaaaattcttcaccattgaaaattcttcctccacagtgatatttcgatcatactggtttagaatattgcggagaaactgggcgatcaggctcacggcatgctgcacctggggagcatgttcgatataagccagccgggacaccatattaaatgcattgaaaagaaaatggctgttaatctgggactgataaaatttcagttcgctgcgggtcagcaggttctctgtttccagggtcttctctttttccatctggagcatacgctcaatcgtctgtttatcctccaattcagccagctgcatatggattcgatttaccatgtcgtggtaggcgcacagtaaaattcccagctcatcctgcagcccagttttagacagagaagggccatttgtggaaatggacatggaacgaacagaatctgtcagggcgcacaggggcttaataatggaattggcgataaaggcagctgccagaatcaggccaagcagtattaaagtaagtgtcagtatgtcactccagatagtcttggtgacacggctgataatggtatatctctggtctgttgatacggcgtccatttcctttgtgatatagggagagaatatggaaattagatgcgcaagctcctgagcctcctggtatgcctgcatcatagctggctggtcattgagactgttcactgcacgatcagtcagctgaagcaggtttgatcccatattgaccagactctggctgtaggggcggttgtcagaggtgtgatccagctctttcatgaaggtggaaaactgatccctgacggtagtatactcattgagggtttgttggttgttggtgcttaaatagtccgtaagtttgctgcaaagaacattgggcagtgtgagattctggtaaaactgtgtctggttatttgcgttgtcctggatatcgttgatggcatggattgacacattggccagaatccccatggacacaatgctgaaaagtgtgggaactagcaccagcagcagaatccgcagacggattgaccgaaaaaagggaacctttatttttgatgtagtttcaggaattgagtgattgtcatacctttccattttttaaatgcctcgctaaagtaagttttactggaaagtccgcatgcgttgcataactcttccagtgtgatcgtgggattcgtaagcagcagattctcggcatgctgcattcgaatttctgtgagcacctgggaaaaatttcttccgcagcgctttttgaacaatttggagaaatagccctgctccaggcccagacggttcgtcaggcctgattgggagagatcctgaccaaattctgttttcatgatcagtagtgcgcggtcaatgacatcgccggtatcaggcactggcagagttttacaaaactggagtaaggatatccagctgctgccgcctttttcctgtagcgcacacattggtctgacggcatttataaggggctctgtgggccatacatccagcatagccagaaatgtccattggatcaattcccatttcagctggggatctgtataagactgttccaactctttcagataccggatagagcgtgaaaactgcacatcccagagaaaacgctgcagggtatgggtcagtttctctgcttctgcgttccgcagaattttccaattccgtcgtgggatttccaactcctttgaaagtacatccaaaggctgccatgcacattcttgcgcaatccttactttacttgaacaggaatcactgatgcgcaggaacagattcaaatgttgggtataatattttccataaatccagaaaagggtgtacagcttttgtagaggaactggttgcctgggttcaaccaaagcgatcatatgcctgttgctctcaaaatcaaaagctgtcagccaatctcttgctggaaaaaagcaaagtgtttcttctagctcatgcatatgctctgcatccagaggagtagaggaaaaaaagtggaggactctggtttgataggtgtcatcatccggccagcccatgggttccagataggcggttgatcggatggcttcccggggatttttaatcatttctgctacagccagatggcccagccctcgaaggatttgggactgttccgtttgctggcggcatatagtcattcgatggagggcttctgtaatacagctttccagagtttcgtataattctttattatcagcaggctttacaatatagtcaaatgcatgcagggatatggcacgccgggcataggaaaaagaatcgtaagcggtgttgatcacgatgacgctggagcagttaagatggtttagctgttcgcaaaggctcagtccatccataacgggcatacgaatgtcaacgatcagtatatgtaccggctgttttatccatgcttcaagtccactttttccatcctccgcctgccagaggacacaggcatgaggaaagctgttctctataaacagacgcatagtttctctttcaattctttcatcttccacaataccaaatgtgatcatctcttccgtcaatggatcaaacctccttgcaatattatctggatttttgtatggcaaagtcaatgagatggatactggcggcagtctcatctccatctatcagccggcgggcgatttccatacttaagctgcccatttcgctgtgtatctggcaggccagtgcatccatctgtccctcatcaagcagggccagtgtagcctctgactcatcaaagccaaacagatgaatgtctgtgcggctggagccggaaactgcctgtgaacacagcagagtactgttctcattaatggaaataactacctgaatcgaaggattctgttcaaggagctgacgtatttccagtaccgtttgaacagagtaattgctgattatataattttgtagctgctgaccgttttcatcaaaggtattctggataccttggatacgtcccagaagattttcacgattggtgctttccgttgaatatacaaggagtgtattctgtccagtctccatggactccagggcaagctgtccaattttacttccagccgcttcgttatcgattccaatatatgcggttctcagctcaggtggactgtcacagtcgatcatgataactggaatctccttttctgatgcggtcgtgagcagatcatcggtctcatgatctgccagagtataggaggtaacgatggcatccacatctgaataaatggcaatagacaatgcctcattcagatccatggcaaggcttggatccgcatgcttggtgtacaacatcagcagttccacatttaggtcctttgctttttcagacatgctgttttcaatatctgaccagaaaacaatatccgaataagaaggaatgatacaggcaatgacaggaatatctgcctgggcgtttacttccggttggaaataaaatacagcgcacagcagcattagaaacagggttgccttctttttcattttagataattcctcctacaaacatagaatattccagcttcaattgtaatcaaagaagaaagaaaatacaaccatttgagaatacgtttttttgtctgaatacatgaaaaacagggaaaatcatggcagtatcaacaggcctgcccgccaaagcacaaaataaccaaattctaaaatattgcataaactgccgtctgtattttatagtgttgtcaggcaaaatgccgaagacaatgccaagattaataaaaaaggaggaggaagacatgaaagtacgtaacttaatcgctgtaggtatgactgcagcaatggttctgagccttgcactcaccgttggtgcggcacaaggcggaacaggcaatacccagggagggcaggggggcccgcaggagccggttgtatatgagctgaaggcaggagccgctgtacgtgacattacacctaccgtggaaaatgggatgctgcctattgatgctgttggccgtacaactgctgaaggtgtgatcgatccgctgcatacaagagtcattgccatggaggatggagaaaatgtggcattgatcgtttctaacgagacaggcaagggaccttatggtccgctgtttgctcaagaactcagtgatcacacaggtgtaccgctggagaatattttttatacggcaacacatgcacatgccacgccggaaattacaaatgagattgatatgagctatcttacatttgatgagggtgactcagaagtaacaaatcttcagaaatggggacgtttggtttatgatcagctcatggaggccgcggatgaagcgatcgcaaatctggagccggtgactatggggattggttattctgacagttatgtgaatgtaaaccggaatgccaagtatacgaatccagatggaacctattactgggctcagggctatggctttgacggcttctccgacaaaacgctggcagctatccggttcaacagcgtagagactggtgagccggtggcctttattgttaactatgccgtacatggtgtgatcatgtatgccaatcaggttctggatggtaagactggaatttccagtgatttaggcggttatgtgtgcaatgccctggagtctcagaatgaaggagccgttgccatgtttctgatgggagcagcaggagaccagaacccattgtttggaaatgaattctttacgcccagtattgagactggcgaaaaagaaaccactacacaggggtctctagaagtattggactggatgggaaagcttctgtattttgataccgtagaagcagtcaagaatattgaaacacagactggcaatatcaatcttgggtttgaatatggaacaaccgccattcctggaacagatggaagtgattatcagctggctcttcaggtgatgcgtatcggaaatgttgcactggttggttttcctggggaaatgttcaatgagattggcgtaaatgcgatccaggcgtctccgatggaaaataccctttgggtaaacctggtatggtcacaggcagaccaggcgaccgggtatcattctacagatgtgatcacggcagaaggaggccagggacggaataagaactataagccgggctatatccaagacgcagtaacagagctgaccagagatctggtttcttccagcttatattaatgtacagtagacatagagaaaatagaaagggacagaataatgaaaaagagaatattagcgttaacacttgtattggcagttgcaacagggaccacagttatggcagctcctatgacagacgtatacaatgagtacggtgcacataaaggacttgatgattcaacaaaaaatgtggatgtttcggagatattgacagatgaagccattgatgcctatgtccatgccggcaggtatattgtagcagcatctccggtggcagagggggaatatgaaggaaatggaaccttctatgaggcttccagctttgaatatggtacgggtctgtatgtaattatccaggatgaggattctaccaataagcattatacgcttattaagagtgcccaggaccttaccgttggggaaccctattgctatgcccagggagatattggcggccgtctgctggatgataagtatacatccacacggatggagcataactatctggatggggagtattcttatgtatcctatgatctgagcggcggaaagatggctgcccaggaggctgctcttgatgaagaggggataccgctggatagccaggaggagggctttacctatatttatctggtggctgagagtgcagcagattattatcagcgcctggccaatgaggaggcaggctatgaaacttgctcgcaggcagaggaccgggcttatatgcctgtaaataatacaaatcagagcggtgaagcgcttaataactgggcgaatattaccatagaagaagaggataaggattataatgacaggattacccgcataggcggtacagagggagaatccaataccagactgttctcctacagcggccaaaatgtgatcgttgcaaagatctgtgtgagcattaccccgtctgtagcacagctggcctggtcccagtccaatacctttgacgcagatacggattattctgctgccagcggagacattgaactgaagattggtgatacattgcctctgttctttcatacccagtacaccagtacatggggacgtgatggttatgctggcgcagagatgacttttgacatcgctgacgaaagtattatctcctacgttggaaatgactccgaggcagaaacgccaaatacactgacagccttagcggcaggaacaaccacccttacggcaactgttaacgacagcgaaggcaagtatgcaggcggcgctgccgtgactttgaatgtgacggtaaaagaatgaatggaatcccattgggattttgaatgtggaacctcaagagtggaagcagagtagctggattaataaagagagaaccactggaaaaaattggggccgctaagaaacggccccaatttctgtgcattttagtttttaagcataaatacttcctgcggatttaacaagctcttctaagagtacctgcatcttaccaattaccgggtgatccttcaatccatattcttgtgccagccgttccattctggggaaagccagccaggtacttccttcttcatcctcccatatggagatctttaaaggaagctccaaagagaagctttgatccatctgcatcagtccagttccaacctttggggaaccaaagactacaaccgtggtgggacgcagggacaatccagcttcttgggcatttcttgcatggtcaaatttggcaaaaatgggtatttctttttctatgagaagattttccaggcgtgttaccatttcatctactggaaactgtccttcaaagaggtacaatttattatcatcatagtttgtggaaagcagatccccgaaggctcctgcaattcgtcttcccaaattcgtaaaatctaccccttctttatttgcaagcaaggtcacacacacaagttcatccggatgggtaaatctgctgagaaaggcagagtatccaggaagagagcctttgatatccatcaagcctctgtgcttgtaaaactgccatccggccacacctggaacctctgtgccatccggaagattccatggggtatagatgaattttctgtgctctggctcatggataagcacgcccccggccaatccgatatcccagaaggaaatatcctgtgccgaagcccagatatcacccactccccggactgcgctggaatcggcggttttgtgggcagacccttcctgatcatagcttgcggcgggttctgttggatcgatatacttcccctcttttttaaacaattgatgaatattctctgtaagcgatatatcctcatgtaagaaattttctaaatcttcggcaaaccctgtcctcttcagcccgagaaattgtatctgcctctcggttataaaatcgtgataacttttaccgctgatacgctggataatttctgtgagcattaaaaaattagatgcactccattctacctttgtaccaggagaaaaatgcagtttttccccacggatcaattcaagaagctcctgaaaggtccattttctataaagattaaattcattgttctgataatccgttagccctgatgcatggcggagcatctgcacaatttcaatattgccccattcttttggtacctctgggatgtatttagccagcttatcctccaaattcagcttgccgtcttcatatagctgcatcacggccacagccgcaaatgcttgggaaatgggacctgcaggccacattgtattggctgaggccagtctgtgctgagcggaatcggacagaccatagcctgccactcttggaatatagggggcttgtacaatagccagagtaagtccgggaatttccttctccttcatgaattcccaaatcattgaatccacactctgtccaagataggacacatctgcactgcctctcattttcatagttttatgatcttttgtgttcattgttgctcctttcctgtgctttgggcacagagtaaaaacatcccatatactgtaactagattaattacatttcatgctgtaactataacagttacaattatgattgtcaagggttttctataagatccatgagactaagttcttttctcagattcagctaagagtgagaaaattgaaaggtccgttcaatgttatggggtgaggacattatatggagttagaggggccatccaaccagacctactttatggctgaggagtacaaagatacttaagttgtcttattttataataatcattaaaaaaacaaataataacattgaaaatcttaattattagcagtatactatttctatagttctatgaacccatttcacacacccattcaggaggtatctatggactttaaacagcttcagtcatatatcactgtagtgaggcataagagctttacaacagcagcagaagaattggaaatttcccagcccaccatcagcacgcatatccgtattctggaggaggagctgaacaccaggctgatcatccgcacagccaaaagctttgagattacccagagaggctgggaattgtacgaatgcgcccagaatatcttaaagctgaaaaatgacatgataaaacgctggagcggtgaacagtcaaaggtgatccgtctgggtgtgtccaccataccctctgcctaccttctgccagaggttcttcccagttttggaaaagaacatgaggatacctatttcgtggtgagccaaagtgacagccggggcattatagaggcggttcacaagggaacctatgacatcggcctggtgggtatgaaaacagatgatgagctgctggaatttatccagtttttccaggaccgcatggttcttataaccccaataacagaaaagtatctggaattaaaaaagcaggagtcccttgcccttaaggagcttttgaaggaacccatgatccttcgggagcagggcagcgggagcggaaaaagtgcggctctttttctggagaaaatgggtatttctgaggaagagcttcacattactgcaagaatgaatgaccaggaatccattaaaaatctggtggccggaggcctgggggtctccattgtatcccacaaggcggtgcaggattatctggatgccaaacgtctgttgaaatttgaactgcccggaaatctgtcgggacggcagttttacattatctatcaaaaagaatacattttaaacgattatgtcaaggattttattgattatcttcggaagtactatcaatgaatttataaataaagcttacgaaaggaaaaagaaatgttaaacttaccagaaaattttgagacctatgctgaagcaagaaaagcgggctttctgcgtatgaaggaactgaaagaaaaagggggaagagttgtaggtgttttctgttcctttgtccctcaagagctgcttatggcggcaggagcagtggcggctcccttgtgcgcttccagtgaggagcccattccacaggcagaggcacatctgccaagaaatctgtgtcccttaattaaagccagctatggttttgctcttacagacacctgtccctattttttcttttccgatttcatcgtgggagagactacctgtgatggcaagaggaagatgttcgagctcatgaatgaaataaaggatacctatgtgatgcagcttccacattcccggtcagagacagcccttaagtcttgggagggagaaattatccgtctgaaggagaagctggaagatttctatggtattaccattacccaggaggagatagaaggagccatccgtctgaaaaatcgtgagcgcaaggcaatgctggagtttttggagctgggcaagctgaatcccgcccccataagtggttacgagatggggacaagactggacggacttggctttcattttgatatggaggcccgctgccaggtgattcaggagcgtaccaaagaggtatatgaggactggaagataaattaccaggggaaaacaagtacccggcccaggattctgatcacaggatgtcccaacagtggtgtgcgtgataaaattattaagacagtggaagagctgggcgcggatgttgtagcctttgactgctgcaatggaacacgagagaaagtagagccggtggatgagtcattgcccgtttaccaggcattggccaagaaatatctgaacattaattgttctgttatgagccccaatgacagcagaatcgactatattgaagaaatgatcgatgaatatcaggtggacggtgttattgaaattatcctgcaggcctgtcacacctacagtattgaggcccattatgtgaaacaggcggtggccaataaaggaaaagcctatcttttgacagagacagattattctcaggcggacaaaggacagattggcacccggctggaggcatttctggagacgatagaaaagtgatggagaaagaaaaaaagtattttgttggaatagacatcggctcgactgcatcaaaaacagttgtgctggacgagaagcaggtagttgactcctttgtcctgcccacaggctggagcggtagagagactgcccgggacatttatcataaaatagaggaaagaggatattcttcccagatgcgctgtgttgccactggttatggaagggtctgcgtggattacgctgataaagtcgtgacagagatcacctgtcatggaaaagggggctgggctttatttcatagaaatgcaacgatcatcgatgtgggcggccaagacacgaaaattatcaaggtaaaggaaggtcaggtggaagattttcttatgaatgataaatgtgctgcgggtacaggaaagttcatagaggtgatggctgcccgtgtgggcgcttccttggaagaattttataatctggccgggaatggccggccgctgtctatcagtgccatgtgtacggtgtttgcagaatcagaagtcatcagccatattggagctggagaaaaacgggaagacattgcggcaggagtcattcactctgtcgccgcccgtgtatcaaaccttgccacacgttttggaataaattcagacgttctgcttaccggaggcctatgtgccagcccttattttatacaggttctttcagataaactgggacggcctgtgactacccatccctttgcccgctatgcaggagcactgggagctgccctgactgcgggaaacagaacaggaattccgctataacttaatttacagagttgactaaaacaaaccatatagagaggatggatcacaatgatcaaagtaaatgcactgggcgatgcctgcccaattcctgtagtgaaatcactcaatgccataaaggcattaaaaaccccggatatcgtggaggttctggtggacaacgaaatcgctgtacagaatgtcactaagatggcaaaatccaggaatttcagcgtaaagtccgaaaagctggaagaaaagaagtaccgtgtggagatttccgttgagatgtgtgcctctgaggacaaagaggaacctgcagatgtaccagagaatacacacagccccgaaggtacccaagactccattgcctgcattccagacgcaagaaataaaaatgtagtggcagtcatttcctcctcctgcatgggcagtggagatgaccagctgggagctgccttgatgaaaggttttatctatgccttatcccagcaggagcagctgccgtccaccatccttttttataacggcggtgcaaagcttacctgtgaggatgcgcccactttggaggatttaaaatccatggaggcccagggcgtggagatccttacctgcggaacctgtctggattactatggtttatcggagaagcttcaggtggggggcgtgacaaacatgtatgtgatcacagagaaaatgacacaggcgggtttgatcgttaagccatgatttatctggacaacgcggcgactactttttcaaaaccacctgaagtagaaaaagcggtcctgcaggctttacattctgccggaaacgccggccggggcgcccatggggccaccctgggggcttccagaatgatctatgataccagagaaaagctggcacggttatttgacgtatccgatcccagaagaattgcgtttaccagcaatgccacggaagcattaaaccttgcggttcaggggcttttttccaggggagatcatgtgatcagcacagtctgcgaacacaattccgtgctcaggcctctttatcttattgaaaaacaaggtattcaggtatccttccttcctgcagatcaaaagggccggatggattatgagaagctggaggagctctgccggtcaaatacaaaggcggttgtgatcacccatgcatccaatctcacaggaaatgtgacggatttaaagaaggtggccgcctttgccagaaagcatggacttcttcttattgtggatgcctcacagacagcaggtattattcccattgatgtagaacaaaatggaattgacattctctgcttcactggccataaaggtttaatggggcctcagggaaccggcggtatttatgtaagagaaggtctatgcgtccgtcccttgaaggtgggaggcagcggtatacacagctatgacaaggagcatccgtccatgatgccggaagcgttggaggctgggaccctgaacagccatgggattgccggactgaatgccgctgttacttatctgctttccaaaggagtagagaccattggacaacgggaacgcagactggcagaaaggtttgcagaaggtgttcatggaattgaaaatgtctgcctctatggggattatcacatgaaagaacgcgtggggattgttacgttgaatattggacaagtggactcctccacagtaagcgactggctgtgggaggattacgaaattgccgtccgtgcaggagcccattgcgccccgttaatgcatgaagcactgggaactaccacacagggagccgtgagattcagcttttcttattttaatacagaagaagaggtggatgaggcgataaaagccgtgcgtacccttgcacaggaggttgaataaatgagggagaaaaaagagcagctgatcatcacctttgccactacctctgaggcaatgcggatggaaaaatattgtgtggagcatggggtgagaggcagagtgatccctttgccggcagaaatatccgcaggctgcggcctggcttggaaaacagatcccaaggagcgccagaccattgaggaaaaattagccagcgaaggaatccgctgggaaaaaatggagatactttatctttagccttataagagaaatcatccttttcaaagccgttgagaacataagcggctgctggggagacttacattttatgtggctatcccggggttttagaagtatttttatactttaaagagtttctgacgacgcgagtattcagaagctcttttttttattacataggaaagttcgctgaactttcctatgtaataaaaaccctccgggggatgcacacaatgtgcaaaggaaagcagctttgcagctgcacattggcgcacaaagctgcgttaacaaaagtaataaaaaaagaacatagatgatatcaacaacaaaaaacaaatcttataataaagcaaaaaaagatacgtattaacttatcataactatttagcgaaaaagcgaggagaacagatatgggagattttttttcaaagctgccaagaggagaaaaggataagccattgttattagaaatagggcctttaacttatgatttccacgatattgacggcctttattttatgctgaaccgcagattatcagggtgcatgattatgatgtgggcaaagccaatgaatccagaatatgcagggaaaatcatgcttgacagtaaagaaatatcttcttatgttctggagcccatggcccaaatgggaggcgtgtggatattaggcattccattaagggggatagtgacagaatatggaagagaatataagcttcacgtagaaggttttacagatacggatggaaatgtgatgaatccccaagattttgtagtacggggaatagataaggtagagcctgatgcaaaatatgagacacatgaagccattgcacggcaggctgcagcggagggaatcgtgctgttggaaaacaggaatcacatactgcctttaaaagaaggaaagacactgaatctctttggcagaggaatccatcagttcaggaatggagcggttggcgccggaaaaatctcacccaggtatagtgtcagtctgacggaagcaatcagggaaagtgatgcttattgtttaaatgaagaactggtacagttttatagctgtgatgaggatgagattccttctgtagaaattttaaagcgggcggtcagtcaatctgacctggcaattctgcttctgacaagggcggccggtgaaaatatggactgttccagcggcaaaggagaatattatctgtcagataaagaagaagaactgcttggcgttttggccaagaatttttcccatacggttgtaatattaaatgtgggttatccgattgacgtaagctttgtcaggcgttatggtatagatgcactggtatattccggattcggcggtatgctgggcggacctgcgcttcttgatgttttgtccggaaggataaatcccagtgggaaactgccggatacatgggcagaggattattttgatatcccggcgagccgtaacttttatgactgtgttgacaaaccaagactggatgcggaatgtgagacatatctggacacctgttatgaggaggatatttatgtgggataccgttatttcacaacatttcataagaaggcagcctacccctttggatttggcctgagctatactgaatttgatatgaaaacagacaaaatagagtctgacagggaaggaatcacactttgggtccgtgtaaaaaatgtgggcggcagagcaggaaaagaagtgatccaggtttatgttggaaaacccgacggcaggctggaaaaacccgaacgggaattagtgggatttgaaaaaacaaaagagttaatgccagaagaggaacagaaatttttaattcgtattcccaaaaaacatctgagttcctactgtgaagaagaagccgcctatattatggaacagggaatttataaaatttatgtgggcaatagttcagaggcaccatattgcggggaatttaaattgcaaaagacagaaattataagaaaggcggccaaccgtatggttccgcaggaaaaactggtgaccttatccaaatatgcagaggagcaaacctggcctaaaggggaaaaatcaggaatttgtgaaggcaggaagacatttgagccctatgcaccgagaaactcttaccccatcacacttaaagcggaaagtacggcagaaaagatatcctttgacgatgtaagaaatgatttatcaaaggcagcagcttatacagcacagatgaatctggaagaactggcccgtatttcagtctgtggttctgcaggatggggaatggaaggaagaggagaagcagggcatattgtgcagttggacaattatgatatgcctccatttccggtatcagatgggaacagcggtgttaacctgaatgtaaaaaatattggtatgccatccggagtgactatctgcgcttcttttaacaaagagttatcagagaaggttggatgggccataggagaggaagccaaagagcttgggatgccaatgatactggcccctgcatttaacattcacagaaatccgctgaatggaagacatccggaatatttttcagaagatccgtatttggcaggggtaatggcaggctgttacagcagagggatggaagagacaggtgtggcctcctgtatgaaacatctgcttgccaataactgtgagagcagcagaaaacggaatcagagcatcatgacagaacgcgctgtccgggaaatttattttaaagcgtttgaaatcgcaatggaagtgcatatgccggcagcggtaatgactgcttataatgcctgtaatggacagccgacttccacggaccctgatctgatacagggacttctcagagaggaaaatggttttgacggttttgtcatgacagactggacttcctatgatacggctgatattacagctatgatacaggcaggcaactgctggatcactccgggaactgttgatgacacattcacagcccctattgtggaaggggtaaaagacggaaggattgatgaagcgcgtctgcgggaaaatgtgacatggatcatccggacaatggcacggtttgtttaaatactataatagaagtggaacgagaagccggaagaagcggaggcggagaatatggaagatagcaaaaaagagtattttatactggaaaagctttttcataactgtgggataccaatcagtgtatacgataaagaacagaaaaccgccggctttccggctgtgtgcagtttcattgatatattccaatgggatgaagcattactgcgggatatttgccagaaggctgacaggaaaagaagaccgatcatttatatggaggagcagaccatcttttttggggcattcagggacaaaaaaggaaaatattacatatggggacctgcttcattagaaaaaaaggacacccttcagacgaccgcgtacaggcataagcatcacattgcggataaagattactctgtaatgaaatcttcttatgagattttatcaaatattatgtcaattgcttatatgtgctgcacaggtgaagcaattgatgaggaagagatactcattatatggaaagatgaggaggaaaaatatgccgccaatccggcagacatagagtttttgcagctggaaaagtcggaaatgaaccggatccataacagtatagagtatgaaaacagatttctaggtgctgttgagacgggcgatgttgctgcaatgaaaaaaatcatgcacatcagcagctttgaagtggaggggattggtgttgtggcagaaacggcatcaaagcagatggagtatttgtgtgtgtcgtccgtgctgctggtatcaagagcagccatacgcggcggcatgaatcccgaacaggcatatgatttgtctgatctgtatctgagaaaaatagagaaatgcaaaacagcagaagagatgatgacagttgcaggtaaaatgcagcttgactatacggaacgtgtaaagcgcgcacgggaactgcgcaaagaaaatatctatgtggagaagtgtaaagattatatcggcatacatttaagaaaacatttccggattcaggagatggctggggatataggtgtaagccgttcctacctgtctcggatttttgcggaacaggagaacataactattcaacagtatattacaagggaaagatgcgcacatgcggcaaatatgctcagctatacggattatagtatatctatcattgcagaatatttttgctttgccacgcagagccattttgggaaacagttcaaagatatttacggaatgacgccaaatgaataccggagaaaaaaccgttacatagagagcttcagccatacaaaagaaaaatgattttatgagagaggttaccgcattgctgcggcagcctctttttcaattggctcacgtcccggattctgccggacacataaataaaaaataagcagaaaaatgtaaatgcaatacataattgataaaaaaggaacaaatatgatatttgaaacttataatctgcaatattatctataacagaaacaagatctgaattgcccgggaaattcaggagacagcagaaaaggagaaactatgattcggaagaaatggaatactggatggaaagtcagtaaatcaggcggaagccctatgatttcagagatggctggactgcagacagaagaacagtctcttattcttcctcatgacgccatgatccatgaggcaaggacacaggatacaaaaaaccagcaccaaacaggattttatcctggcggatgctatacatattccaaagtttttcatgtaccggaagagtggagagagaaaactgtaagaatcgaatttgaaggggtctataaaaatgccagagtatttatcaacgaagattatgcaggcggctgcccttacggatatacagagttttctgtgaatgcagatgattttctggactatgggaaaaataatacaatcaaggtcattgccaataacagtgacgaagaaaacagccgctggtattccggcagcggtatatacagaaatgtaaatctgctggtgggcagccttctgcatatcagagaaaatggcgtaaggataagaacgccggaagcagaagaggatttagcagttgcggaaattgaagtgtgtctggaaaataaagagttccggaagaaaaagactgtccttcagattgagattatcgacagagacggatatacggcaggaatggaaagaatacctgtcacactgttcccgggaggcgcggaagtgtgcagacagaggatacaaattgagagacctctgctttggagctgtgaaacacccaatttatatcattgtcagatacagattctggaaaacggagtgataacagacagggcggaggaaacatttggtatccgtaagctttcgctgacagcgaaaaaaggactgcgtataaacggaaaagaagtgaaactgaggggggcctgcattcatcatgataatggcgtgattggcgcctgtacgttggaacgtgcggaagagcgccggtgccggcagctaaaagaagccggatttaactgtatcaggagttctcatcaccccatcagcagggcaatgctggatgcctgcgacagggaggggatgctggtgctggatgagctctctgatttctggacacgttccaagaataacaacgactatgcgcagtggtttcccgattactgggcagaggatgccaaacggatggtggcaaaggactataaccatccatgcgtcatcatgtatatcaccggaaatgaaatccaggaagccggaacagccaaaggcgcttccctgaaccgcaggataacggaaatgtttcattctctggatgatacccgttatgtaacggctgccatcaatggactgcttgcctgtatgaatcgcatgggcgatattatgtgcgatataaccggaatgaccatggagcagatgatgcagatgcagtcacaggccgcctcccccgcttctgaagcaggcagtgatgcggcaaacggcagcactgatttaatgaaggggcctatggcagatgcttttgctgtcaatggtattgtaacggaaatgctggaagaattttcaagtgtgacggatctgaccggatataattatctgacggcaaggcatgaattggaacacaccttatatcccaaccgtgtcattttaggaacggaaacactgccctcagatattgtgcggctgtggaagattgtgaaagagaatccgcatgtgatcggagatatgacctggaccggatatgactatctgggtgaagcgggagccggagttttctattatgacggccgtcagggttttatgccaaactggccgatcagcatcgcttatatgggagatattgatattatcggttacagaaggcccatgagctattttagggagattgtctatggacttcgcagagaaccgtatatagcagtagaacgccttgatcattacggcgaaaagccgaatcagtctgcatggatctggaaagacgagatcgccagctggacctggaccggctatgagggaaaaccggctgttgtaaatgtttactcagaagcggaggaagtggaactcctgctaaacggcaagtctctcggcagaaaaccggcaggagaacagcagggatatctggcagcatttgagatcacttacgaaccgggaaaactggaggctgtcaactaccgctccaaaacagcaggggagacctgcgagctttggagtgcacaggagtcggtgaagatttgtgtggaagcagaccgcaggcaattgcaggcggatggggcagatttgtcttatctgacggtttccctggaggacgcatcgggccataaaaatcttcaggcagtcaaagccgtgacggtaacggtggaaggggccggaacgcttcaaggatttggcagcgcagacccggcaacagagaatttttatgataatacaacctggaatacatatgacggttaccttttagctgtcatacgcgcaggagcagagcccggcgagataaaagtgaagtttgaagccgacggatgtaacagaagagaaattgtgatagaggtaaaaaaaacggatagatgtcaggaggaaaatgaaaaatgagtcatgcagaagcttcaaagagtaaaaaaagatggtatccatgggcatggagcaccagagggtttgcgctgggggtcaatacaatgcttttgatgcaggttactttttatgcgacggagagcgcaggtctgtctgcgggactggtgggtacgctgctgcttatttccagagtgtttgatggagttacagatttggttgcaggatttgtcattgataagactcatacaaaactgggaaaggcaaggccttatgagctgtttttaatccccacatggattctgacggtgttgctgttcagtacaccggatatgggcacggttggaaaggcgatctacttctttgtactatatgtgcttatcaacgcagtatgtgtcaccttcctgagttcatcggaagcagtataccttgcacggtccacagcggatgaaggactgcgcgcgaaggcactgactgtagccggtatcatgtccaccttatttcccacggcagtgagcattatcctgcccattttgatggcaacatgggggacacagcctggcggatggactaaaatcatgctggtatttgccgtgccgtttacgattatgggattgatccggtttttctgtatcaaagaaatggatgtggaagagaacaacgcaaagactgcggcgtcaacaatttcatttaaggattcattaaagagtatcagccataacaaatatctttttattctggcggcagcagcgcttatctgccaggtttataatggaatcaatactgctgtgggaagctattatttccaatacatagtaggagatctggcatccatgtccctcgttggtatgcttggacttgtgacaccctttgttttattactgttcccgctggcaatccgtaagattggcggaatgaattttgtgaggattggactggtaaccgcgatcatcggcaatgtgatcaaattttttgcagggaaaaatgtaactatgcttttgataggttctctgatcgcagcactgccgggagcctccgcgcttatgatgattggaagcatttttgtcattcagtgtatggattacggtgagtggaaaacaggcatccgcgtagaaggcatggtgaactctgtctatggctttgccacaaaagtcggcggaggtgtggccagcggtcttcttgggcttttgatggcagcggcaggatttgtaggcggcgctgcacagcagacggcttctgccaaaacagcgatcacctggagttattctcttatcccggcaatcttatgtgtggttatgctggtgattctgcatttctataggctggaaaaagaaaatagtaagatccagacagagctcgctaagagaagagacagggaagcataaaataaagacgtatttgctccggccatggaagccggggcaaatgcggtatatggaggaaaaacaatgaattattactgcaatccattaaatttagaatatcgttatcaattcacaagaaatatcagtacggatggaaaggaacttccgttttctgtttaccgtgaagctgccgacccatctttggttttatttaaagggttatattatctgtttccttctatgacggccggattttttacgagtaaggacttaaatcactgggaatttcaggcgttcagacaggagatgccgatttatgattatgcgcctgatgtgagatgtgttggggaatacctttatttctgtgcatcaaaaagggatgaaaactgttccttttacagaacgaaggaccctctgaatgagccatttgaggagatagaagggactttttccttctgggatcccaacgtttttcaggatgaggatggaagagtgtatttttattggggatgttccaatcaagaaccaatctatggtgtggagctgaaccctgacacaatggagccctatacagaaccaaaagttatgtttgattcctgtacagaagaaagagggtatgaacgatttggggaagaccatattgccccccggactgaggaagagattaaacaacaggtagaacttatgatggcccagatgaaagcttctggtcaggcagcaccggagataccggaggaagaacagcggaaaatcctctacggctatatgggaaaccgtccctatatagaagccccctggatgacaaagcatgagggaatctattatctgcagtatgccataccgggtacagaatataatgtttacggtgacggcgtattcgtgagcaagtcaccgcttggaccatttcagccggcaaaaaataatccttattcttataaaccgggtggttttattactggcgccgggcatggttctacactggaggataaaaccggacgattctggcatactgcgagcatgagaatcagccataatgcaagctttgaacggagaatcggattgtggaaagcaggctttgatgaggaaggggaattatactgtgaccaaagatatggagactggccaatctgtatggatacgcctccatttgcaaaaccggaatggatgcttttgtcctatcaaaagaaaataaccgtttcatccggtaccggtgcggaaaatattacggatgaagatatccggaccttctggaaagcagaacatgggaatgcagacacatgggtgcagcttgacctgggaaaagagtatgatatgcgcgcagtgcagatcaatttctttgatgacaaggtaaaggctgatgtaccggataaaagtctgcttgtaccaaaattctatgaggaacgctatattgatacagagaaacagaggaccagatggcttcttagctgctctctggatggagaaaaatattttgtgcttgaggataaaaggagttcagaaaccgattatgcccatgattttcttgtatgggaggaaggcatacgggtgcggtatctgaaattgatcatagaagagctgccttataagcaaattccctgcatatccgggatccgcgtatttggaaacggggagggaaagctgcctgcaaaagcaacagaggtgacattccagatggacagtgaatttgatatggatgtttcatggagaggggaaaatataataggaagcaatattttgtgggggtatgccccagataagctgtaccatagctgtatggtgtttggaaaatgcagacaaaaaataggtgcgcttgtaaaaggacagccaatctatgccagagttgatgtattcaacgaaaatggaatagccgaaggcgacatttttcaagtcagaggttaataatgttgagcggatggaggcaaagatgctgaaaatatatgatgtaagaacagaatacagaaaaaatcctgttggaattgatacggcattgcccaggtttgcctggaaattaaaatctgactgccgcgatgttcagcagaagagttaccatatcctggtaagttcagagaaaaatatactgtgggattcaggaaacgttcacagcggtcaatccatatgcgttgcatatgaaggcaaaagacttagtccccagacacgatatgaggtgcaggtaagcgtcacagataattatggcaatagggctgctgccgaaagctggtttgagacaggacttatgggatacgaaaatttccgcgctgactggatcacccatgggtttgaggacgacatagaagcatgtgctgtttttgtaaaaaagttctccgcggacaaagcagtaaagtcggccagaatttatgccagcgcgcttggcgtctatgaattacagctcaatggcacaaaagttggagatgcctgttttgcgccgggatggaccagctaccagaagcggatccaatatcagacctatgatatcacgcaaatgctgagaacagaaaacgagcttgcggtcaccgtgggaaatggctggtataagggaatccttggattttataatcagggaaaccattatggaaagcgcacagcagtcatagctcagcttgacatctggtttgaggatggaacaaaggaatctgttgtgacggatgaaagctggatcagcaccttgggggagcggcgttacagtgagatatatcatggagagatcatagattacagcgttgacacaatagagaataagcccgtccggctttatgaccagccaaaagacgtgctgaccgcacaggaggatgagcctgtgaaaatcacggaaaggctgccagcaaagagggttttcgttacgccgaaaaaagagacggtgattgatttcgggcagaatctagcaggagtcgtggaggcgcgcctgcggtatcccagaggaacaaaaataatcatcaggcatgcggaggcgctggatgaaaacgggaatttttatactgcaaacctgcgtacggcaaaagcttcagatacgtttatctgcagcggcggggatgatgtttttaagcctgttttcacatttcacggtttccggtatattcagatcattggactggatgaattgccggagcctgatcacttcactgcctgtgtgatgcatactgcatttgacacaaccggaaaattctcctgctcaaatgaactggtcaacagattgtggcagaacattgactggacgatgcggggaaactttctggaagtgccaaccgactgcccacagcgggacgaaagattaggttatacaggcgatgctctgatgtttgcttccacggcggcctgtcacaaaaatgtagctctcttttttgcaaaatggcttagagacttgaaatatgaacagtcactgggattcggagtgcctacctctgtaccaaacatacttggaccttccgggggaatagcaatctggcatgatgccgcgacagttgtgccgtggactatgtggcaggtgtatggcgacaaacgctttcttgaagagcagtttgagagcatggtcagttgtgtggaatacaccaggaggaatacgggagagggcggactgctttggaccggtcagcagctgggcgactgggtagcaatggacatggagcggggaccataccttccaagagaaggtgaagtctggaatctggagttaaatgaaaagacaggatccacagatttgtattatatagccaatatctattacgcgtattctgtatatattactgcacagtccgctaagatactgggaaaagaaaaagaatttctcaaatatgaagaattgtatgaagcattgataaggagtatacgtgaggagtatattacgaaaaatggacggcttgtcagcgaaacacagaccggatgtgcattggcgcttcagttccgtcttacagagggtaaggaaaaagaacgtgtattggagaccttgctgaaaaacctgaagaaccacaaaaatcatttgacgacaggatttgtaggaacccagtttttgtgcagggtattatctgaaaatggcgcccatgatatagccggaagcatatttttaaaagaggactgcccttcctggctttatagtgttaatctgggggcgactacaatctgggaactgtgggatggggtgaaaccggacggaagctttaataaatatgaaatgaattctttaaaccaatatgctctgggttctatcggagattggatattccatgatctgtgcggcctcaaaatcgcagagcccggttataaaaagtctgtggtgaagccaaggctgatcaaaggcattaccagtatggctggagagatagataccgtttacggcacgctttcctgtgagatatcctgcctggaccacaggtataccattgatatttccatacctgaaaatacaaccgctgttataagtctgcctgaaaaagaggaatttacagtcggttcaggaaactatcactatgaatatgccacagagagttcctttataaaagaaaaatacgatatggaaagccggtttggagatatactggatcacccggccggacatgagcttttacagcaatatgcaccggaacttctttctaatgagatgtttctgcagtttgcaagggaacacacattgatggatatgagtgaaatgctgccgcctgaggcaatgcagctaatgcagattgttctggcagaatgcaacaaagccaaataaaaaatataaggagattagtcaatgaaaataaaagaaatcataaagcaaatgacactggaagaaaaggcggggttatgctcaggccttgacttctggcattttaaaggagttgagcggcttggaatcccatcactgatggtctgtgacggacctcatggactgagaaagcaggaaggcgaatcagatatgatgggaattaatgagagcatcaaggcagtctgctttcccaccgcctcagcattggcagcatcatttgaccgggaactggtcagaaaagtgggagagaccattggagaagaatgccgggcagaacaggtttctgttattctgggaccgggctgcaacataaaacgcacccctctgtgcggacgaaattttgaatattattcggaggatccctaccattcatcggagatgggggctgcatttatagaaggggtacagagcagacatgtgggcaccagcgtaaaacatttcctggcaaacaatcaggaatatgaccgtatgagttctgattcggttgtggatgaacggacacttcatgaaatatatctggcaagttttgaaggcgcggtaaagaaggcgcagcctgcaacggtcatgtgctcttataataaaatcaatggaacttatgcagcggtgaataaagagatgctcacagatatcctgcgggaaaaatggggatttgacgggtgtgtcatcacagactggggtgcgggaaaagaccgggtgaccgggttaaaagcaggcctggatattgagatgccgggaggaaatcccctgtctgatcaaaaaattattgaagccgtaaaaaataaggaattagatgaagcagtcctggatgaagcggcagaaaggattttaaaattaattgaattctgcacggaggaaactgcggaaacatatcgttttcaacatgaaagggatcatatatttgcaggacaggttgaaaaagaatgtgctgtcctcctgaaaaatgaaggaggaatcctgcctgtggggaaggataaaaaagtggcatttatcggagccttcgcagaaaaaccacggtatcagggaagcggaagctctcacattaacagcgtatatgtaacatctgttctggaggcggctgccggtaatcacaatatcagctacgcaaaaggctatgaagaaagtggagaaaagaacggagaattgcttctggaagcagcagcctgtgccaaaggggctgacctggcagtgatttttgccggtcttcccaacagattggagtcagaaggcgcagaccggcctcatatgcagatgccggagaatcagaatttattgatccatgaaattgcgaaggtgcagaaaaatgtagttgtagtgctccataacggttctcctgttgagatgccgtggatttcagaggtaaaggcggttctggagatgtacctgggaggcgaaaacgtaggcagcgcagcttatgaactgttatatggaaaggcaaatccatgcggaaaactggcggaatcttttcctgtaaagctcagtgacaatccgtcttatctgaattatccggggaatgctcacactgtgcagtacagggaagggatttatgtgggataccggtattatgataaaaagcagatggatgtgcggtacccctttggacatggactcagctataccacattccactatgacaacatgactctggataaaaaaacactgggagacaatgagcagctgaaagtcatggttaccattaccaacacaggaaaatataagggaaaagaggtagtacagctatatgtgtcggacaaacagagcacatatgacaggcctgtgagagagctgaaaggataccagaaagtagagcttgaaccaggggaaagcaaaacagtggagatggttctggataaaagagcatttgcttattataatacggtgattcatgactggcacgtggaaaccggggaatttgaaattgaaataggaagttcatccagggatatccggctgtccgaaaccgtgacagtagaatcacagacggagattccagcagtatatacgatctattccacaataggtgaagtgctgcagacaccaagaggccaggccgtattaaatcccatgattcaggctatgtcagagacaaccgatcatgtgacagatgtcatgggtgaagattcagaagatataatgaaggagatgatgaagtccatgcctctggcagcgctggtgaacttcggggctgttacggaagggcagatggaggagctgctggaagcattaaagggttaaaaagaccgcctatatgaatatccgaaggtatggcatctgttatctcctccgtgaagtcactatctctgctccataaaacagtatccctgcccctgcctgcccgaatccaacgatccaatatacccatatcagtttgtttgtagtgccgggcataggcggcaccacttccatcatccacaactactgtgtgaaatcccatcagacggacttgctccagtacattgagaaaagtgggttctggctggtaagcagggatcaaagcaatccaatttttcattcaggcagtcatctccttctcggtactttgagagctctgtgtatttccagtactctcggtttcaccggccccgcctttttgtacccggccgccgggtcctccaaattccccgttttcccccatactgccaggctccgggaattctccgtcttcaccaggctccgggaattctccatcttcgccgggctttgcaaattctccgtcaccctcgggtccgccaaaacggtttcctccgcccatgccgccgtggcctctgcccatgcccataccgtcaccgcttccagaaccatagatcaaagaatccatggtgacttccgtggaggaggaacctgcggtgagtgtataggtggagccctgggtgatctttggagtgctgatgacaacagagttaaaggttttcggggaggtccaggaaatcaacacctggccgtcactgtcctttaattcaataagactgtcggcaggttgagaatccactgtgaccagcatggagccctgggtagaagaagagccaaagttttgtgccatcccagatgaaccagctgccaccagggtaccgcctgagatatcagcttctccattgtagtccagcatgccgttgccattgtcgctgggtccagatacagaaatttcacctccagaaacacttaagtctccattggagtcgattccgtctccggaggcattgatggagattgtgcctcctgcaatgtggatgtaggcatccggattggctgcaaaggcatctcctttgccaaagcccatcatgccgctctggtccgttcctccggcggcgttcagaccgtcatcgctggctgtgagagcgatgtctccgccggtgatttcaatggtcagtccttcaatgccctcatagctctttgcaatattcagtgtgcctccggtaatagaaagctgatcatccgcgtggaggccgtcatcccctgtggaaagctgaaaactcccgccgttaaaggccagggaggcattggtatgcagcgcgtcatcggcagagtcaatttcgtaagtgccactgttcagtgtgagatttcctccggctttgattccctttgtgctgactgtatcctcctgggcagtgtcggaggttcgggcgctgccggggaattctctggtatgggcgttggcgttatcacttccgcctcctgccagaatgtgataggttccgtcatcaatctgcatatacccggaagcactgattccgtccccttgtgcgtcaatcgtataggttcctcctgccagatagagaaagcccagggaagtgtcttcggtgttttctccgtgaagtgcgtctttgccggattctatgttgaagcttccatctgcaattcggatgctgtcctttccggaaagcccgtggctgtctgcatgcactacataggttccgccagtcactgtcagatcatccttggacacaatcccatgtcctgcgggagattctacagttaaggttccagagccgttcaaggtgagatcctccttggaaaaaatcacagcatcaatgttgttgtcatctatttgggtaaaggttccaccgttggataaggtgttttcagaatctggagcctgagtgagcactactttatctgcctgcaggatatacacagcagcacaggtctcactgtttatagaagcattgtccagcacgatctgcagtttgtctgtcttctctgcatttaccagaatcataccgtcctccagggatccggtgagaatataggttccctcatccttgatagtgactgtgcttccggaaatctccacggaatccgattcacatgcagcagaggttccattgagctggatgacagcactggcgctctcatcataacccacctcgtaatcccggtcagtgaacatctctgaggtgtccacggcagcaatctcttcagaagcagacccagcatctgtttttccctctgacacagtttctgctgaagctactgtttgtgctttggtattggttcccgtcagggaagcagccttggcttctgtgccggagctgctgtcctgagaggaagcactttggccgcagcctgccagaaaaagggcgggacacagcagaatggggaacaatttctttcttttcataaggaatacctcctttataattcagccactgtggtttcttgcttggaaattgtgatctccaggttgccgtttcggcagcggagcttatccagcagttccttttctttgtcagggtttcgcagggtcaggttgtaagtgagccggaacaggctgcccatattggttgtttttacttgtgccagctcccaggagctagtatattctactaaaatctcctcaaacacccctggatagtccagatcttctggaatggtgatatgcagtgtcttatacctgaaggtattttttcttgagccgaaatccaggtggctgtacagtatgctcatgcctccaagaataatggagaaaagaaaggcgtagcccaaataccccataccggaaataagtcctgcccccatggctagaaacaggatgccgatttctttagccgtaccgggcacagagcggaaacgcaccaggctgaaagctccggccaccgccacaccggtgcccacattgccgttcaccatcatgataaccacacagaccactgcgggcaaaagggccaaagtgaccacaaagctctttgtatagcgggtgcggtacatatatgccattgccagcacaaggccgatgagtaaagagcagcctacgcacaacagaaaatcctttacagcgataacgctggtcatatctgtgtcgaaaattcctctgaaaaatgtatcaggcatataaccgttctccttcctgaccacacaattcaatcttttgataggcggttccatatttagaaaaggatgttttaaaaagcttctccaaagagagaagatgggtcatccacaaggggattcccccagatgtcttaatttccatcaataccatccccggttccagcagaggggttccccaggctttcgcttccagagaaagagcttccttgcgtgccaggatgttctcgtcaaaggtcacccggaaatcatctccacacagggaataaaaggcctcccgctcataggacaagaacattttgggtgttaatgtttcatagtaatcacagaaatattcaatctcttttgcaatctgagaggattggggaagctggttttttttgcaaagccagcgcaaggcctgaagctccggaagagcgatccggcgtttgtacactacggactgatattttttcttcaattccacaaataccggttcctgggggctggccttttcataggagcggacccggagcttttctttataagcagggcgctcaatggaacggcgcaccagccggtatgtaggcgtgtcaaagtaaatgttgcggatggtagtccttccgtattgatccagagccatatagggcaccattgcctcaaggacaaggtctttctgctcattggtcagcaagtattttaattcataacgcttgaaattcatttgatagttcacaagcagcacctcctttgtaagggcattgtaatcgttgaaccttaagccaagtttaaaaacacaaaatgttcatatttttccaagagttccggcacaaagggaaaaataaatgcttttgtgttggaaatatgctacaatataagaaaataccaggatgaaaaagtgtggagtgatctccaggtgtcatgggaaataccattgtataaatattcaggaaagaattttgcctgggatttagaaaaacttttaggttttaaaattaagttaaagttttcctgctattatgaagcaagaataaatacatataaaaggaagtggttttatgagactgctgctggcagaagatgagcgttctctctccaaagcagtgactgccatattggaaaagaaccattatagtgtagatgctgtatatgatggagtacaggctctggagtatctggaagcgggaaattatgacggtgtgatcttagacatcatgatgcccaagatggacgggatcacggttttgaaaaagctgcgggcaggtgcaaaccccattcctgtgctgctgctcaccgcaaaatcagagattgatgacaaggtggaggggctggacagcggagccaacgactaccttaccaaaccctttaacagccgggagcttctggcccggatccgggcaatgacccgcagcctcactgcccagcaggactgtctcagacggctgggtaatatctctttgaaccaggcgacctttgagctggcctctcccagcggtagtttccgcctggcaaacaaagagtttcaggtgatggagcttcttatggctaacccaggacacttgatctctacagagcatttcatggaaaaaatctggggctatgacagcgaggccgaatccggtgtggtaggggtgtatatttcctatctgcggaaaaagctcagcgccctccatgccaatatacagatcaaggtaacgcgtaatgccgggtattttctggaggaagacacatgattaagaaactgcagtaccggcttgtgggagtggccatgttttctttgtttttggtgctcacggtaatcatcggcagcgtaaatatcctgaattttcacagcgtgatcaaagaggcggatggaatcctgcatattttgcaggaaaacaacggacgcttccctaagccggaggaatggcacaaagaagcaggctctaagccgttaagcccggagaaaccctatgaaacaaggttttattctgtattgatgacagccgggggggatgtgctcctggtggatacagggaagattgcggcagtggataccagtaccgccatagaatatgcccagcgtgtgtatcagtccggaaaaagcagcggcttcctaaagaattatcgatatttgtgccaggcagacagcaccggggacatccgggtgacttttgtggactgccagcgggggctgtctaccttccaaagcttcctttttatcagctgcctggtgtccatcctgggactgctggccgtatttctcttgctggtatggttgtccggccgtatcgttcgtccggtttctgaaagctatgaaaagcaaaagcagtttatcaccaatgcagggcatgagatcaagactcccctcaccatcattgatgcagatgcggatgtgctggaaatggaaattggggaaaatgaatggcttcaggacattcagggtcagaccagacgtctggctgctctcaccaatgatctcatttatctttccagaatggaggagggtgggaacccataccagatgatcgattttcctgtttccgatgtggtcagtgagacagcccagtccttccaggctccggccagaacgcagaaaaaagattttgtctgcagtgttcagcctatgctttctttttgcggtgatgaggaggccatccggcggttggtatccatcttgctggacaatgcgttgaaatattctcaggaagagggaaggatttccctgcgtctggaaaaacagggaaggatgctgcgtcttttggtgtttaatacaacggaaactgtgatggaaccggagaaggtggaccatatctttgaccggttttatagaggggacccatcccacaattctcagaccggcggttatggaattggtctttccatggcaaaggccattgtggaagctcacaagggaaaaatcgccgccttgtcagaggatggacaatctcttcttattacggctctgctcccagtaaagtaatgtttatgcttcaattccccatcccctcactcatgagaggcttgacggctttgtgggccaatatgtagctgcgaagcagctttcctatgcaataaagaagaattctgcaggacaggattctttttttttattacataggaaagttcttagaactttcctatgtaataaaaaccctccgggggatgcacacaatgtgccagggaaagctgcttcgcagctgcacattggtagctttgttctttaatactcgttgggagaaagaaaattacttttaagtgcaaaaaataagaaaaattttaactttagaaaaaataagcaaaattgttttgaattaattggaaatgttcggtataattacagtatattctccttcgcttttctttaaattaggcatttttataagattttatctatattgaatataaaatgcagaatggaggtgctgccaatggatttttaaagaatgacttctgttaaatcagcagaagtcatcagggaaaaattttttatattttgtgaagttttataagttcccagttgatccagccgattcctggggaaagccaggctgggagttgacggtcacccagtttctgctatgacatctctggataacgcccagccggaagatattcctgttatggaacggattgtccgcaaacccaatagggaatgcaaatatctatttaatcgcaagaatttttataattacagaggatgttgaacatttatgcaaaagaaaaaaattatagaagaggctattcgcgaattaacagagcatgcactgcagaactgcaccatgcatacagaactggaaaaggaatccttatataaggaaattcgagacttaagcatacgtgccaaagcaatactgaaaattctggcagaagaagaccgtcggattttaattgaatattatgaaaaaaccatgctgaatgcagatcacgactgccaatatctttatgtacagggagccaaagactgtgtacagctattaaaaaaacttggcatactttaaccttatcaaggaagcccccttttgtatggattgctcataggaagaggaagggggcttcctttttggaaaaaatacaaaatctggaccaataaatatacaaaagcgatagcatttgtccataaatatggtataatagtagagaataactggctaatattacaaatagcttgtttcagctttgaccagatcaacaagctaaaataaaactatacgaggaaaaaaacatgactttgcagaaactggtattggtcgtagaggataatgagctgaacagggaaatgctctgtgagatcctagcctctgagtatcgtgtattacaggcagccaacgggcaggaggcgcttgatattttaaaaaactacaaggatgaagtctccgtaattttattggatattattatgcctgtaatggacggatatacgtttctctccattgttaaatcagataaatcctattctgcaataccggtgatcatcaccacacaaagtgacagcgaatccgatgaggtcactgctctggcccatggagcttcggattttgtggcaaagccctacaaaccccggattattttacaccgggttgccagcatcatccatcttcgggagacggcagcaatgatcaaccagttccaatatgaccggcttacagggctgtacagcaaagaattcttctaccagagggtgagagagcttcttgtgtctcatcctgagaaggaatacgatattgtgtgctcggatattgaaaattttaaactgatcaacgatattttcggaatccctgcaggagaccggcttctgtgcgaagtggccggcctatacaaaaaaatggttcaaaacaaaggaatctgcggtcgttttaatgcagaccagtttgtgtgcctgatggaacggggagaagaatatgcagatgagatgtttattgatgcggcaagcaatgtgaactccctatccaagacgaaaagtgttgtgatgaagtgggggatctattccataacagaccgcacacttcagattgaacaaatgtgtgaccgggctcttttggctgccaaaagtattaaagggcagtatggcaaatattttgctatgtatgatgatgatctgcgggcaaaacttctccgggagcagaccattacagacagtatggagagtgctttggcagatgagcagttcgtggtgtacatgcagcccaagtacagggtgaaggatgaacgactggttggggcggaggctctggtgcggtggattcatccacagtggggatttatgtctcccgcggaatttatccctctgtttgaaaagaatggatttatcaccaatctggaccagtatgtgtgggacaaaacatgcagaaccttgagagagtggctggacaaaggttatccctccattcctgtgtctgtaaatgtctccagggcggatgtgtatcaggcggatattgttgatgttcttatgaaaatcgtgaaaaaatacaatatttccccttcccttctccatctggagattaccgaaagtgcttatacagagaatccagatcagcttctcaatacagtgattcatcttcggaatctgggcttcattatagagatggatgattttggaagcggatattcttcattgaatatgctcaaccgcatgcctttagatattttaaagctggatatgaaatttatccaaagtgagaccgcaagatttaacaatcagggaattctccgcttcatcatgggactggccagatggatggatctggaagtagttgcggaaggagtggagaccaaggaacagctggagtgcatccaggatattggctgtgattatgtccagggctattattttgcaaaacctctgccctgcaataagtttgtggagctgcttaccggctcatccatgaccatagcagaaaaaaagatacgtgatgaggaaaaccctgagggcgacagaccggttcttctggttgctgatgaggacagccagtaccgcagtcaggtgaaagaggcgttcagttcaaaatatgaagtccttgaggcacaagattcccaacaggcagaacagatgatcagaaattatgagcctcggctggcggttgtccttgtgagcatgactttgccggactcccgggaattttcggtcctcagaattttgcagagagagaaagcaatctggaatattcctgtgatcgctaccggacctgcggacaaagatctggaggacaaggcactggatctgggagtggatgattacgcattcaaaccacacacccagaagagtctttggaagcatgtgatccgcaccacaggagccagcacgtcctgggagcgtgaacgtattctcatggaggaggccaaccgggattatttaaccggacttctcaaccgccggggactgaatgcggcgctgaaatcgatccatagagaagatatgcctctggccgtttatttgtttgacttggacaatttaaaagagataaatgacgccttgggccatgcccaaggggatgaaattataaagaaattcggcgcactgcttcattccagtacaagagatacggatattatatccaggtatggaggggatgaatttgttgcagtgatcaaacggattgattctgaacagacagccgtcaaaaaaggcgaggaaatctgcagggcatttcggaaaagtgatcagggaggccgtctgaccacggcatgtacagccgggaccgttatctgcagccaggaatatagagggatttcggaaatgctggatctggctgaccaggctctgtacactgcgaaatcagaaaataaaggcggatgctgtctatggaggaaaggacaatagaatgttatgaaattacaattaacgcctgcacaaactgtgcaggcattttgtcaaagttggtttgaacacagagatgaaaaaaaggcggccacatttttggccgatgacataaattttgtgggagcaggagaagaagaatctgccatcggaaaggagaagatgattcagtacctacaggcagatatccaggagataccggagcccttccaatgtgacctgaagatggttcatgaacaaaagctgggtgaggtcttttacaacctatatctggaaatggcattgaaaaattctacgtatacctggtatctgcggggattttttattttagccaatgaagaaaacaggggatggcttattaaaagctttcatatatcagaagccgggaggagtcagataggcaaggagcactatcctcagactctggttgtggaaagtatcgaaagacaaacacagaagcttcttgatgaaagtcttcccggaggaatgataggcggttacatagagaagggatttcccttttattttattaaccaaaggatgctgaattatcttgggtatgagaaggaggaagaatttctctcagacattggagggctgcttgccaacggtgttcatcccgatgatagaaaggacgtggaacataatattatccggcagctgcagacaggggaagaatatggggtggaataccgtataagaaagaaagacggttcctacatctggattcacgaacagggacgtaaaaccacagcccaggacggacgtcctaccgcatctgctgtgtgcattgatatcacagcacagaaaatcgcacaaaaagaagtcttgcgtctttatcacagcattcccggggcagtcttccggtgccgggacgatgagaatttttcagtgattgacgcaaatgatggtctctttgagctgctgggatatacccgggaggaattggaagagaaggggaaccagctggccgccgtgattcgtcccgaagatatagagtacgtgaaagggcagattaagaagcagctggaaaaggacagccatattcaaattgaacatcgtcttgtatgtaaggatggctctataaagtggatctcaggaaaagcccagctctatgaggaatctggtaaagagaattatctgtacggtgtctttgtagatgtgacagagcaaaaacggctccagcagcgcattcagcagatgtaccaggacgagctggcttattttgccgaggtttcttcaggggatggctgcatccagtgcattttgaacgtgagcaggaatcggctggataagtatttgtcctcatcagaggttgcagtggccaaagtgggagattcttttgatcagctggtggaaaatctggccctggccgccgtggaccaggcctatgcagagaaaatccgttttgacctaaacagagagaaggtgctctgcgatttttccaacggacgggtggattaccagtttgaatttctgcgcagacgaaaggacggcggtgtattctggggaagcacaagatttcgttcctgtctcaatccagagacagaggatgtgatcatgtttatgtatacccaggatatcacggagcaaaagctcagggatcagcttctgtgcaggatcgcagacctggattatgacagtattatggagatcaatgtacctgataatacctaccgggtgatttcttttctcaacaacaagatggggatcatgccccagcagggagatttctataaggaaattcaattggcagcccagaagctcattgatgaagatcaaagaaaagggtttttggaaaagcttagctatgaatatatggaagagcagcttgcacagcaggacgactatacctttatggtggagatgcgcaatgagaaaaatgaactacggacaaagcgtttccatgtgttttatatcagcagggagcttagaagggtttgtattgcacgcacagatcttacggatgtggtgcgtcaggaacagcagcgaaaggcagcactggaggctgcattggcagctgccgagcaggcaaatgcggctaagtcggatttcctgtccagaatgagccatgaaatccggactcccatgaatgccatcatcggcatgagtaccatagccgccaaatccatcggagatgatgagcaggtagaggagtgcatttctaaaattggtatttcctccaggtttctgctgtccttgatcaatgatatcctggatatgagccggattgaaagcggaaaaatgcttctgaaaaacgaaaagatccccgtggaggaatttctcaacggcatcaattccatctgttactctcaggcagcggccaagggagtggattttgaatgtattatagatccggtactggatgactattatatgggtgatgccatgaagctgcagcaggtgcttattaatattctcagcaatgccattaaattcacgaacgaaggtggaaaagtcacattttctgtaaaccagcgaaaaaaaaccagcacgggggcaatccttcgtttcattgtaaacgatacaggtgtgggtatgaatgaagactttttgcctcatatttttgaacccttctcccaggaatctaccgggacaacggcattgtacggcggtacgggactgggccttgccatcagtaagaacattgtggatatgatggacggaaaaataaccgtgcgttccatcaaggatattggaacagaattcactgtggacgtcaagctgggcataacagaggaagagaagctccgtcaccgtcagaaaagacagcagcaatataacttctctcatctgaaaaccctggtggtggatgacgatgtggccgtgtgtgagagtgccatggtaaccctgcgtgaaatgggggttaaggccgagtgggtggacagcggacgcaaggcggttaagcgggtgcagatgctgtgggatacaggaaaatactatgatctcatcctcattgactggaaaatgccagaaatggatggtattgagactgccagaaggatccgggccattgtagggcctgaagttaccattattatcatgaccgcctatgactgggtgtccatcgagcatgaggccaagctggcaggtgtgaacctgcttatgagcaagccaatgtttaaatcctccttaatctctgcgttttccagagctctgggagaaaaggaggagaaggctgcggaacaggataaaatagactttgattttacaggaaagcgggttcttctggcggaagataatcagattaatacagaagtggccaccttgcttctggaaaacaagggctttaccgtggaggctgcagaaaatggacttcgggctttggaaatgttcagcaaatccccggaggggtacttcagcgccatccttatggatatccgtatgccccttatggacggccttatggcctctgtgaacatccggcatctgagcaatccggatgccaagacgattccgatcatagccatgacggcaaatgcctttgacgatgatattgagaagagtaaggctgcaggaatgaatgcgcatctggccaagcccatagaccccaacagactttatcagactctttatgattttattttcaagaaagaggactgaacaaaatcacttaaaaaataaaagggatcatcacatctaaaataaaccatcccttctctgtataacaagacatatctccaccaagattttgaacaatgtcccttatggtgggcagtccatagccatgtcccgcttccttttttgaggtggccgggatatggcctttttctattttcagatctttgtcacaggtattttttacccggatcaataaatatcctctgcggagctttacaaatatggacactgcccgctcattcacaggaagctttgccagggcttccagggcattatccagggcatttgacaaaagcagggagaattccaccctgttctcataaaaagcagggtcaatctccagcttcacttctgcctccagagcctggaggcgggggataaactgcccaagaagggcgttgagataagaatctgcacagtagtccgctgtgccggaactttcatatttaatggttttttggagaaactccacagctttttctttttttccctcctggagcagccctgtgagagtggccaggtaggatttcatatcgtgccgcagcctgcggatggcctgctggttttccagctgggattccagctgcagcttttgatcctccagaatacgttccttttctacggtctgaaacaactccatctggcggtatacggccagaaaaatggtggcataggtcaagggcataagaaataagaccaccaccatggcaggcatttgatcctgtctgccggtaatgatcgtggggaaacttcccataagccacaacagcacataatacaaggcggtcatggaggcaaaaaccccccagcccgtcttaatttgttcctgcatttgcagatagggacgccgcagatacttccaggccgcatactctgcaaggggaaacagaagcagacggcccagaaacatcaggatgcaggactgatcggcaagatagtagtctaatatattagtcacatcaatgatccacagggaaaaggtatccgccagacagaaggtgaaaaagaactggcctccccggttctgactcatgatatagtaaaataccagactgggtacagtgcaggtgacaataaaaatcttccccatcacctgaaagcccagcagcaccattcccagcatattgatcaggatcaggaagcccatacataggccggtggctattatagtcaccttccggccgtatctggaccggtaaagcatcataaatatcactagaacatgaaacaaagaccataacatagataaattccgcagaagttccaaaatcttcctcctaatccatctcctgaaacaacatggcatggaaacgtctcttcgcctctgcgtggtaggccctggagatgggcacatgataatctccgcacagaaattcgttcccaataagccggtggcagttatacagatttacaatatagctctggtgacagcgcagaaaaatttccatatccagccgtgaggcaatgtcatcgatccggccccgggtttcaaggattgctccgtccgtgcactgaaaataaagattatgtccccggctgaatataaaggacagttttccataagaaagagtaaggatctgcccccgggttttaatggcaaccgtgcgctcccggttccgtttcagctgctgtgcactgcgctccagaagctcctccatggcagagggctgtatgggtttgatcaaatattgaaagatataaagatcgtaggcctccctgtaaaattcttcactgccggacacaatacacagcagtgcgtcagaatccagctttcttaatcttcgggccagggaaatcccatccaatccatccatgaaaatgtccagcagataaaggtcaaaggtggcatttccttcttctacttcagacaggagggcttcggcacaagaaaagcagaatacctgatgcgtgggtccgatcaggcttctcaggcggcaggtgtcttcaattttatcatcacatagggcaatcttcattgtggtatctctcctttgaatctattatatccagtaaactttcctggaacaatgtcaaatttgcttattttccgtctaaatttgtcactcttgatactgtatgggtattagaggagagaaatgtgtgaagactatttgttctatagagcacagaacaaagtttcgttgttttttactctgttatatgttaaaataaacgaaatggtatagagacagagtggaactttagaagttagaaagaaaagggtcttggaggaaaaatggaatgcagccaatagagacagtaagagaaaccgtgcagaatttatgctgtgtatggtttgaagaacgggatgccggcagggcagcacaatattttgcagaggatgttagctttgtgggcacgggagagaatgaacatgcccggggaaaaggggagatgaccgcttacttacaggcagatatctgtcagctggcagagccgtttgtctgcgcactggctatcattgatgatcagatgatcacggaggagatctgcaatatttctgtaaatatgactctgaaaaattctatttattcctggcgcctgcgggggttcttttctttggcactggagggagaccgatggctggtgaagaccatgaatctttccgttcccagtactcttcagcaggatgacgaacattatcccaagaccttagttatgaaaaatattgcccgccagcgtcaggagctgctgaatgagtccctggccggcggtatgatgggcgggtatatagacaagggattccccttttattttattaaccgccagatgctggattacttagagtatgacagcgaagaagaatttgtggcagagattgacggcctgatcagcaactgtatgcatcccgatgaccggcagatggtgtatgagcaggttgaacggcagcttagagataacagtcaatatattgtggaataccgcatgcagaaaaaggacggaagctatctgtgggtacatgacataggaagaaaaattcttgcagagaacggaaaaccggccattacctctgtatgtattgacattacttcagaaaaaaatgcccgggacgaggttctgaatatatataacaatattccaggagcagtattccgctgccggttcgataaggatttttccattattgatgccaatgacggcttatttgaatttattgggtattccagggaggaatttgccgccatgggcagccggatgtcggcagttatctatccagaggactatgtgatcatggcagaccggcttcattcccagcttcgcagcggcaacaccatacataatgaaaaccgcctggtgtgtaaagacggtacaataaaatggatctccatcaaaggccagctctgtgaagaagaggaagaacagtatttctactgtgtttttgtggatattacagaggaaaaacggcttcaggagcgggtgaaggagctctatgaacgggaactgacttattttgcagagctggcctctgcaaagggcagcattcagggcaggctcaatgtgacaaagaatcagacggaaagctgcctgtccacatcagagacggcggctgtccagatggggaatacctacgatgagaccattgggtatctggcggcatcagccattgaccctgcctatgggcaggagattctgcgcacactcaaccgtgagaaggtgctggaggactatctggcaggtaagacccaatataatttcgaatttcttagaagacacaacaatggaagcgagctgttctggggaagtaccagctttcgcacctatttaaatccagagactggagatattatcgtctttttctatacctttgacgtgacagaacaaaagcttcaggaagagctgttgaagcgggtggctgagctggattatgacctgatcacagacatcaatatggtaaatgatacccaccgcctcatatcctacgatccaagccaggaaaacatcattcccaggcgtgggagatttcagcaggccatccgcaagatcgcccgtaaatttatggatgaagagacgcagaaagaatacttgtccaagctggattataagtatattcagaaagaactggagaaacgggaattttatacgctcataattgagatgaaagatacccagggaaatatgcgggtgaaacgccttgaggttttctatattaataaggtactgggaagagtgtgcatgacaaggacggatatcacggatattgtccggcaggaacagaggcagaaggaggaactggcggccgcactggtggcggctgagcaggccaatgcggccaagacagatttcttgtcaaggatgagccatgagatccgcacacctatgaatgccatcattggcatgaccaccatcgccacccagtcaatgggagatgaggagcaggtgctggactgtctgtccaaaattggaatctcctctcgttttcttctcactctgatcaatgatattctggatatgagccggattgaaagcggcaagatgcttttgaaaaacgaaagaatccccgtagaagaatttctcagtgggatcaataccatctgctatgcccaggcagtttcaaaaggagtagattatgaatgcatcatagatcctaccctggatgattattacattggggatgccatgaagcttcagcaggtgctcatcaacattctgagtaatgcggtgaaattcactgaggaagggggaaagatcaccttttccgcagaacagcgcagaaaagtaaagaacagtgcggtcctgcggtttgtggtaaatgatacagggattggaatgagcgaagagttcctcaatcatatttatgaacccttctctcaggaatctacaggcactacggccttgttcggaggtaccggcctgggacttgccatttccaaaaatattgtagatatgatggacggaaatatttcagttcgttcaattaagggaatcggaacagaatttaccgtggatgtgaagcttgggatcagtgaagaagagaagctgcgtcacaaacagaaaaaacatgattataatttttcccatctgaaaactctggtggtggatgatgatgtggtggtgtgtgagggcattgtggctaccctgaaggagatcggtatctcgggagaatgggtggacagcgggtccaaggctgtggagcaggtccgctgcctgtgggaacagggaaagtattatgatatcattctcattgactggaagatgccggaaatggacggtgtggagacggcccggcagatccgcaggatcgtaggtcctgaggtgaccattattattatcactgcttatgactggattcccatcgagcatgaggcaaaattagccggcgtgaatctgctcatgagcaagcccatgtttaagtcctccttgatctcagcttttacgaaggccatgggagaaaaagaggagaatgaatcggctcagattctgacagactatgattttaccggctgccgggtacttttggtggaggacaatgccctgaacacagaggtggctaaaatgctgctggagaacaaaggcttttctgtggacacggcagaaaacggtctgcgggccatggagctgtatggaaaagcggaggtgggctattatgatgccatcctcatggatatccgtatgcctctcatggacggcttgtccgccactgccaatatccgccacctgagcaatgcagatgccggaacgatccccattatcgccatgacggcaaatgcctttgacgatgatattgaaaagagcaaggcagcagggatgaatgcccacctggcaaagcccattgatccccagcggctgtaccagactctttacgatttcatttttgagaaggagcgcgggatatgggggcagtaaccaaggatgaacttacggatacgcttcagagacgaagatacaatagatttgacagggtttcagggatgatagatatatgcttgaagttctgccgtaaaatgtatataataggtaggattgcataaatgtattacaaataaggacataaaatggagaaggaaagtacctgttttacgttagaaacaggactcctgaaagtgttcaatatgtacgaaaagcgaaaggaattatatgagaaaacttgctttaagtgatgaaatattgctgaaaatcgacaagtcggcccgctatattggaaatgaggtgaattccgtatacaaggatcctgacatggtggatatccgatttgccatgtgcttcccggatgtttatgagattggaatgtcccatctgggaatgcagattttataccatatgtttaaccagcgcagagatgtatggtgtgagagggtgtattctccctggacagatctggatcaggtcatgcgacaggagaagctgcccttgtttgccctggaaagccaggatcccattaaagtatttgactttctggggattaccattcagtacgaaatgtgctatacaaacattctgcagattttggacctgagccgcattcctcttctggcaaaggacaggacccaggaggatcccattgtcatcggcggcggtccctgcgcctacaatccggagccgctggcgcccttctttgacctgttttatatcggagaaggagaaatctcctacgatgcattgttcgacctttataaggaaagtaagaaagcaggaaaatccaggcgggaattcctggaacaggcggcatcggttcccgggatctatgtgccctccttatatgagccagcttacaatgaagacggaaccctggcgtcctttacacccatccatccaggaattccccaaaaggtacaaaaacaagtggtcatggacatggagaagggatatcattccattgaaaaacctgtggttccctttatcaaagccacccaggaccgtgtgactctggagattcagagaggctgcatccgaggctgccgtttctgccaggcgggaatgatctaccggcccaccagagagcgggaagtggaggagttaaaagattctgccaagagaatgctggacaatacgggacacgaggaaatttccttaagctccttgagctctagcgactattcccagctaaaggaattggtcacttatcttattgatgaatttaaatcccagggagtgaatatctcccttccatccctgagaattgatgcttttgccctggatgtgatgagcaaggtgcaagatatccgtaagagcagccttacctttgcgccggaggcaggctcccagaggctgcgggacgtgatcaacaaaggacttacccaggaggacattctcaagggggccgcagatgcctttttgggaggctggaaccgggtaaagctgtattttatgcttggacttcccacggagacccaggaggatatcaaggggatcgcccatttggctgagaaaatagcagaagagtattatgaagtgcccaaggagcgcagaaacggcaaggtacagatcaatgtgagcacctctttctttgttcccaagccctttaccccgttccagtgggcgcccatgtacacccagcaggattttatcaacaaggccaaggtggtgaaggaggagattcgtgcccagctgaaccagcggagcataaaatataactggcatgaaccagacgtgactattttagagggctttcttgcccggggtgaccggcgctgtgcccaggtcatattaaaggcctatgaaaaaggggccctttacgatgcctggtcggagtatttccgttttgacatctggaaagaggccttcgcagaaaccggtgtgaatattgatttctataccctccgggaaagagatacccaggagcttcttccctgggatttcatcgatgcaggggtcaccaaagaatttctaataagagaatggaaaaatgcaaaagaggagaaggttactccaaactgcagacagcgttgttctggctgcggagtaaaagcctatggaggaggtgtgtgctatgaaggtgcgaattaaattcagcaaggagggctccatgaaatttgtgggccatctggataccatgcgctatttccagaaggcagtgcgccgggccggtctgccggtagcctactcggaaggcttcagtcctcatatgatcatgtccttcgccgctcctttaggggtgggaattaccagcaccggagaatattttgacatggagctggcagaggaaatgcccaccgtgaaaatcgtggaacgcttaaacaaagagatggtggagggggttcaggtcttaagcgccagaaaagtagaagagggcaaggcaggaaaagccatgtctttggttgccgcggcagactatctcatagaattcagggaaggacaggcgcctggggagggctggcaggaaaaaatcttggaattctacggccaaaagtccattgtggttgtgaaaaaaacgaagaaaagtgagagagaagtggatattaagccattgatctatgccctggagcttaaggataataagatttttcttaccctggcctctgccagcaagaattataccaagccagagatggtgatggatacctttttggactggatgcaagtgtgcccagagcccttttcttatatggtacaccgttgtgaggtatatgcagacctgggcagcgatcaggagcatcgttttgtatctttgcaggatttaggtgaggaagttgagtaagctgattattaccacgctgccctttcagggacgcaggctcttggtcagtgcatggacccaggaaaaccaaccggtggagcttcgggtgctgccccccagggaaaaaagcattctaggcaatatttatgtagcccaggtggagaacctggctgaaaatattcaggccgcctttgtccagattgaaaagggcgtgcgctgttatcttccctttgaggaattggatcatgccctgtataccaatgtaaggcaccaaggtccactgcgcccaggagatgaactgctggtccaggtgaaacgggaggccatgaaagcaaaactgccctgcgtcacggcaaatttaaactttacaggaaagtatctggcccttacctctggcaaccgcaggcttgggttttcctcaaagctttccggtgaggacaagaagaggatcaaatcctggctttgcggggagcctgagacgtcctacggtcttgtggtgcgtaccaatgcggctatggcagaccaggaggaattcctggctgaactggattatttaaaaaaacggtataaaaatgtaatctcctacggaaccaggcgcacctgcttcagtttagtggaagcggcccaaagcccggttctcactgcggtccgggatacctattcccggagtttggaggagatcgttacggatgaccaggagatctatgagcagatacagggatatctgtccatgtatcaagaagaggagacacagaagctccggttttatcaggaccggctccttcccttgtacaagctttaccgtctggagcacaccctggaggaagcggtgaaagaacgggtatggcttaaaagcggcggctttctggtcatccagcccactgaggcctttgtatccattgacgtaaatactggaaaatatacaggaaaaaagaagattcaggaaaccttccggaaaattaataaggaggctgcccgggaaattgcccgccagctcagacttcggaatttatcgggaattattttaattgatttcattaatatggagagccgggagcatcaggaggagcttcttcatgtgctgcacaactatctgagacaggacccggtaaacacccaggtggttgatatgactcctcttcatattgtggaggttaccagaaaaaaagtgcgccgttctctggcagaggagctgtcagagacggcagatcaaaaggaggaagcattatgctgaaatttgctcattttaactttaatgtgctggatctggacaaaagccttgccttctataaagaagctttggggctggagcctgtaagagaaaaggaggctttggacggatcttttaaattggtatatctgggagatcacaccactgatttccaattggagctcacctggctgaaggatagaaaagagccttataatctgggagaatgtgaattccatctggcctttgatacagacaaatacgaagagctgtaccagcaccacaaggacatgggttgtatcgtatttgaaaatccgtctatgggaatttattttattacagatccagatggctactggattgagatcgtgccggtaagataaaaatcaggcgtttctatatagacagatgttcggtgtctgtgtcctttttgtccttttttagaaaaagatttccatggggaatctttttctttttcccttccgttcttttatacggaggtgttatatgtgaaagatttaattgtatatgaatggaagaaaatgatgggcagaaagatcaccctgatctgcctggtgatcctggccttcctgcagattgccatgttccagggaaacagcataccctcggaatatttttatgatgaggaacaggaacgctatgtgtatggcagagaggcttttctgggggaagcagactatgtcagcaactatgctggtacccttacagatgagaaggtgcaggccatattggcagattaccgaagcctgatgaaaactgccaaaagcgagaatcccacgctgttgtcagataccatggacatgattctatttttatttggggatgaagatggaaactggaaccaaaagactgtggcagatatttttcctggagacagcacccctgttctggggtattcctatggatatgctaacacgctttcctatatggaatatttattcattattatgggactctttcttatcatcatcctaagccctgtgttctgtgaggaatacacccttcacacagatgccctgctgcttaccagcagaaatgggcgttcccatctggcagtttctaaaataacagccggatttttggccgttttgtccttggggggactcactcttctgattcatacccttcttgtgtatcttacctttgaaggcgtgggaggagagaccagcgtacagcttaacagccgattcctttttggaccggataccatgacctactctttgaatttccgggaggcttatattctcagctgtgtgctgtggatgagcgccttgctgcttttggccggagtggtatttctgttctctgcctgggccaagtccccctttataggcctggtattaggtctgactttctatggtggaccgccggtactgctgcagtccgccggaggtgcttctatggttatgagttttcttcctgcatgtgcgatgaatatcgccagtacactgaagcttcctccggtttctattggaggtgccagccttccttttacctttgtcattgccgcagtgagtgtggttttcgcagttgtatgttccataggggccgtaaaaatatattctggacataaggtttcctgagcctctgtaaaagaatccttcctttgtgaacatccccttcctttttgtcccaaagtctgttaaaatcgaagtaaagattggattgtaaaacagaagaggggatttgagtaccatgagaaaaatttttaaaggcattgggatttttgtgggaacctgcattttggtggctgtagctgttctgggatttttcacagtacgtgaataccgcccggaccctatagaggtcattgatgcggcaggaggcggacgagagctggatacgggacattccctgacagttctcagctttaatactggctatgggggcttaagcgcccaggaagatttctttatggacggcggtacaaaggttcagccggaaagtaaagaactgatccaggagaatctggatgggatcgcagagattttaaaggaagcccaggcagatgtttattttctccaggaggtggacctggattccaagagaagctacggaatcaatgaggctgatttctatcaggaagagcttggactttcaggcatgtttgcctacaactataaatgtgtctttgtaccctttcctctccctcctataggaaaagtggaaagcggcctgtttaccatgacggatctgaaggtcacccaggcctcccgcattgcccttccggtcccgttttcatggccggtgcgcacctgcaacctgaagcgctgtatgctggagaccaggatacccgtgggtacagggaaggatcagaaggaactggtacttattaatttccatctggaggcctatgataatggtgagggaaaagctgcccagacccggatgctgaaggagaagctggaaatggaatatgagaaaggaaattatgtgatcgcaggaggagattttaatcagaccttcagcaatattgacaaatatcctattctcacaaaggattactggacgcccggggcactggaggaatcggaccttccagagcatttctcctttgccaatgacgatacgtatcccacctgccgactgctcaatgagccttattccccggaaacctcccaggtatatgttttggacggttatattgtatcggataatctggacgtgctgtcctgcaccgttattgatcagcagttccggtacagtgaccaccagccagtgaagctgatggtagagttaaaggaaaattgaaagagaattaaaagaaaaaccctttggaaagaaaccggttctgtgttaaagcaacagaagcagagttttctccagagggtttttatataccaaagtgttccctgccaatacaaaagtttgcgcacaattgaagggtgaacggctcaatggccggtttggcagaaacacaggtatatcagcagggtaggctggcaggggttattctgcgggaaggacatggatgacaaagccgtttttccctttttctttcgcctcatagagggccttgtcagcttctttgtaaatggtctcaaaatcagtgctgccctttggggtgaccgctgccccaatgctggcggacatcctccaggaattggaatagtattcacacatggtattcagcgcatgggaaagctctgccgcctttttctgtacccactccatatccgggacggctagaaacgcaacaaattcatctcctccgatacggcccaacaggtctgttgcgcggaaatgacttcgaataatttctgtgaatagtaaaatacaacggtccccgaacatatgtccgaatctatcatttgcctgcttgaaattgtcaatgtcaaaaataaacagcacatagatggaggcaggatgtttcttcagcgtatggctgatcatctgttccgtggcttttttagtataaaagccggtcatctcatcaatcttggctcttttttccttttgtttttcttcatcaatatttttccggtaggtaaacatatgaaggcatttatcttctggtgagaagaagatataggcatcaatacgcatccaatggtagtttacaccgtcctgggtgatgcggaaatcgtactgaaggtgctcgttgcccatttcgtactcccgtttcacattttccggggtgaaggtgttgatatatccttcccggtattcttccttgatctgcttctgtgcgatcatccgcagcccctggtcaaagggcaggcctccggctcccaggctctcaaagtactgggctgtgcgctgtccggcatagctgtttttcgtaatattcagttcatagatgttgtcatagagctgttccgtggcctttctgaatacttcttcccgctcttcaatcagctctgtgatctgctgattgaaacggtggatcacccgggtgatgaccaatagtacaacgaatatgacaaagactacaaaaagaattgtcaggtatagatgctgctttaatgtatcaattatatttccagtattctggattaccaccaaatgccaggaaagctccggaatataacgggaaaccacatagtttttcccaccggccgcttttgtatcggaggaggaccacagttccagattgatatcatccttgttccattccagtatctgcttcttgatttcttcctggtggcaggtactgaaccaatccacatgttcgtaaccggtgtaggaggtggaaatctggatgatgccctgttggtcgatcagatccgctttcagatcatatttatcctcgtattccttgagcagatcctttagatgatcaatccggatccctaccccgacaatgcccaggaccttgccttttgagtcttgtattttacagtttacgaacacggtgatggcattgtctgcaccagctacttcatcattgtccaccttcagggaatattctgcatcgctgtccaaaaagctgaaataccagtcgttttccaaattgtcatcagtgaggatccggtccagcccgttaaaattataatatcgtcttgtggcagtggaggcgagaaatacagaatcaaaaccatatttttcctggtattggtctaaatacttcttggtggtttccaagtattcttcatcatccaaatgctcctcttcctgggccaaatgatccataagaaggctgtcatgggccatggtgagagatacatttacaggctttgtgaagatatttctgatctgatagtggataccttccgtagtcagagaagacacttgttcgatgctgtctagggatgtttgataattggcctgataactcaagatcgctgtcagggtgaagccaatgatcaatataacacttatcaggacattcgttctgtagagtttggaatttttcaaggtgttctcctccttacatgctttgccctggggatccggaaaacatatggaagatttccagggctatggtgatcactttcataggattcacagcttattctctgagacggcatccagggctccgtaatctctgtccacttcaattaccgcaaaataggagcctggcagacggcggatcttttccttgatctcattgacgatctccacatccgtgtgggtacttttgtagggaaccaccagatcaaaaatcaggttggtatgggtttttccttctaccatgcggaaatcatgaaaggacaattgtccgccgcccacctgagctacaattttccgcacctcatctttcatgtgcagcacatgcttgttgtctgtgacgatgggatccatgtgaatcgttgcagagcagttgagacgttcctgcagatttcgttcaatattgtcaatctcgtcatggatcgtgagaatatccccattggcagggacctctgcatgaagggagattatcacccggcctgggccatagtcgtggacaataagatcatggattcccaggaccatgggcgagctgttgagaatctcttggatctggctgacaaactccttcttaggcggctgtcccagcaaaggatccacggtttccttcatggcctgtattcctgtatagaatatgaaggcagccactaagagtccacaccagccgtcaatatgcaggcctgtaaaatagccggccaaggtggcagcaaggaccactgccgtggacagggtatcgctgaggctgtcggcagcggtggcattcatggctgcactgtcaatctttcgtccaattttcttgttgtaataagccatgtacatttttaccagaatggaaacagccagaacgcctataataataggagaacagtccacaggctgggggtggaggatcttgtccagggaggtgcggaacagctcaaaagccatgatgagcacagctacagatacgaagagcccggatatgtattcaaaccggccgtggccgaagggatgctccggatctggtttctggccggccattttaaagccgatgagagttataaaagaagagccggcgtcagacaggttattgaaggcatccgcagtgatggcgatggagccgcttagagagcctgccagaaatttacccataaagagcagaacattaaggcagatcccagtgagaccgcagagcatgccataggcttgacggactttgggatgcatgatatcttcatagtcgggaataaaaatttttgacagtaattcaatcatatgtcaaaaaacctcctgtgttatttttgtatcaataattctattctaacacaaaaatagtacagtttacagggaaagattggaaaaaaccttgaaaatttaatgaaaagtccttgacaaacacatattcttttattatgataattgagtatgccgcacagagaggtagaagagcatccgtgccaccgaatctggcgagtaatgtttataggaggtgccattatgtacgcaattattgcaacaggtggtaaacagtacaaagttgccgagggcgacgtgatcagagtagaaaagctcggtgttgaagccggtgaaaccgttacctttgataatgtccttgccgtatgcgacaatggaatcaaggttggcgaagacgtagccaatgccagtgttaccgcttctgtagttgaaaacggaaaagctaaaaaagttatcgtttacaagtacaaaagaaaatctggatatcacaagaaaaacggtcatagacagcagtacacaaaggttaagattgacaaaatcaacggctgatctggtgttcctatgattaaaatccaagttgaaaagagaaacagtgcatacgtcagttttgtatcaaagggacatgctggttacgctcctgggggacaggatattgtctgcgctgctgtgtcggcgctgatcattaccactgtcaacggcctggaagcctttacccaagaagaatttcaggtggaagagaaggacggttatgtagccctgcggtttacaagaccaactggtgagaagggcaacctgctcatggatacgctggttcttggcttaacggaaattcaaaatagttataaaaaacagtttttgaccatcaaagtcaaggaggtgtaacgattatgatgaaaatgaaccttcagttattcgcacataaaaaaggtgttggttccacaaagaacggacgtgattctgaatctaagagattaggtgcgaaaagagcggacggacagtttgttaaggccggaaacatcctttacagacagcgcggtaccaagattcacccaggtgtgaacgtaggctgcggaagagactatactttatttgcactgaccgatggtgttgtaagattcaccagaaaaggacgcgataagaaacaggtttctatcgttcctgttgaggcagaataatcagttgaccagtgggggcttcaaatcgttaaggtttggagccttttttatcaaatagatttggattgaggtgtaacatgtttgcagacagagcgaaaataagtatccgttccggcaaaggcggggacggacatgtgagcttccgccgggaattgtatgttcccaacggcggcccagacggcggagacggcggccggggcggagacgtgatctttgaagttgacaagggccagaacacgctgggagattaccgccacaagcggaaatacaaagcccaggacggagaagagggcggcaaacgccgctgccacggaggggacggggaggacattgtcttaaaagtcccggaaggaaccgttgttatggaagcagagagcagaaaagtcattgcggacatgtccggtgacaatcagcgtcaggtggttctgagaggcggccggggcggcaagggcaatatgcattatgccacagccaccatgcaggtgcctaaatatgcccagcctggacagcctgcccaggagctggaggttttgctggagctgaaggtgatcgcagatgtgggtcttgtgggtttcccaaatgtgggaaaatctacgttcttgtccagggtgaccaatgcccagccgaaaattgccaattatcattttaccaccttgagccccaatctgggtgtggtggatatggaaggggctggttttgtcatcgcggatataccaggactcattgaaggcgcctctgaaggcgtgggactgggtcatgagttcctgcggcatattgagagaacccgtgtgatcatccatattgtagatgctgcctccacagagggacgggatccggtggatgatgtatacaagatcaacgaagagcttaagaaatataatccggatattgccctgcggccccagattattgccgccaacaagatcgatgccctgggagatgacctggagcctgtagagcgcctgaaaaaagagtttgagccgaaaggcatgaaggtggtccccatctcagcggtgagcggacaagggctgaaggagctgctgtataatgtccaggagcttcttagcagtacagacagcactccggttatctttcagcaggaattttttccagaggatgttcttattacagagaacctgccctacaccgtggagcaggatgctcaggatccccacgtatttattgtggagggacccaagattgagaaaatgctgggatataccaatctggattcggaaaagggctttgcctttttccagaaattcctcaaggacggaggcattttggcagacctggagaaggccggcattcaagagggcgatacggtgcgtatgtacggatttgaatttgattattacaaataaggagcaattatgacaagcaaacagagagcttatttaaaaagcctggctatgaaaatggaccccatcatgcagcttggaaaggggggactcacccctgagaataccaaggcagtggaggaggccctggccgccagagagctgatcaaaatttctgttcttcagaattgtctggaggatcccagagaaatggcagaaatcctggcagaacgcacccattcccaggtggtgcagattattgggaaaaaaatcgtattatatcgggaaggtaaggaagacaagaagaaaatccagcttccttaataccctttggaggttttcgtggaagagaagtctaagaaaatgggaattatgggaggtacctttgatcccatccatgtgggtcacctgatcatcggcgagaaggcctatgagcagctgggattggataaggttctctttatgccctcaggcaatccccctcataaaacacaccggtgtggcagagccagtgaccggcagagagtggagatggtccgcagggccatacaaggaaatccacattttgaattatccttggaggatatgaatgaggaggggtattcttacacctaccgcacgctggaacggctgaacaaagagcacccggacacggaatattattttattatcggagcggactcgctgtacagtctggagacctggatgaagccggagcgtatcctgaaggcctgtaccatggtggtggccaccagaaaccataccccggtggaagagctggacaaagaaatgagacggctgacagacaaatatcagggagctttttttcggctggataccctgaacattgatatttcctccgccatgctcagacaatggctgggagagtccaaaagcatccggtactatacccctgctggtgttatggaatacatctaccagcagaatatctatcactccagaaaagaaggttaaacaatcaatggcatcctatgattttttgaaaatggagaagaaactcagcaaatacttggatgaagaacgttttgcccatacaatgggagttatgtatacctgtgccgctctggctatggcccatggctgtgacctggaagatgcccaggccgcaggacttcttcatgacagcgccaaatgcattccaaataaaaagaagctaaaaatgtgtgcccagcacaacattcctgtcacagagtttgaaaaggagaatccctttctccttcacgcaaagctgggagcatatttggcagagacaaaatatggaataaaagacgatgggatcctcactgccattgcgtaccatactactggcaaggctgctatgagtgtcctggagaaaatcgtatatattgcggattatattgagcccatgcggtgtaaagccccaagactcacagaagtgcgcaggctggccttcgaggacctggatgcgtgtatgtatgaaattctcaaggataccttggaatatctggaggagaatcctaaggatattgacctgacaacaaaggaagcgtatgattattataaacagattcatgaggaaatgaacacaggaaaggagggaaacgcatgaacacagaaaaagagatggccaagctggcctgcaaagccctggaggagaagaaaggcaaggacattaaggtgatcgatatccataaggtatctgttattgccgactattttatcattgccagtgccacaaaccccaatcaggtacaggcaatggtggacaatgtggaagagactctgggcagagccggatttgaaccaaagcagattgagggaacaaagaattccgcatgggttcttatggattacggcgatttgatcgtccatgtattcgatgaggaaaaccgtctgttctatgatttagagcgtatctggagagacgggcagattctggatgtgcaggaattgtagaacggtttaacaaaatttgtacaaatgagacgatgagaggaaaagccgagagcctggtgcagaacacagactttcggcttttttcattaggatgggatggcggctgtttactggaagaagcggaaaacaccaaatacttttcccaaaatctgtacatcctccaccagaatgggatccatggcgtcattctcaggctggaggcggtaatggcccttttccttataaaaggtcttgaccgtggcagaatcctccagaagagccaccacaatatcaccgttgctggcagtggtctgctgctggaccagaacctgatctccgtccaggattccggcatttatcatgctttctccccttactgtgagcataaaggactgggcattgggcataaactcagcgggcacaggaaaataagtctcaatattttccacagccagcaaaggctctccggcagccactcttcccaccaggggcacattcaccacttccctgcgggtgagattaaaattgtcgtcaatgatctcaatggcccgtggcttggtggcatccctgcggatatagccgttcttctccaaggcttccagatgggaatgtacggaagaagtggatttcagatgtacggcttcacagatttcccgaacagcgggaggaaacccccggtttaaaatttcattctttatgtagtccaagatttcctgttgttttttagatatttttccgtatgccataaaaggtcccccttgaatattcttaagttcattttatcatattctttcaaaaaaagcaaacagatattcggaatatttgttcgcacatgaaaaataattgtattgttgggcattgggggagcagccgtcagagaggtgaacaataaagaaaaatttataattagccttgccaaaaaacggcagataagggtataataaaagtaatccccgtctagcatctatgaaaaggtgactatgatatgaagtttcaaaagaaagcaacaaagctaggggccgtgcttcttgcaggaagtgttctcaccgccgcagtgccgtgggctgtttacgcagactctcagtatgtggtgtatgacattcaggaagaggaggcgtctccctacggctacatacccgcctatgacccagtggaatatctggaatcccagccagaggacacacaagggcttcaggacagtgctgaggatacccagctcttttctgaggaggcaggagaattcttttcagaggatcctgattttgcaggattttctgacagtgtacaggaggaagcagataatggcttttccgacggcactgggttcggaagcattgagttttcggcggatacctttgatgtacagaacattgaagaagagccacagctgcctgagaattttccggtctcatcctatccctcgtcatttcgcctggacgagcttggaatatggacccctgtgaaggaccagaaggatttcggaatgtgctgggcttttagtgcgcttgaatctgcggaaacaggcctgctgtccagggggctggcagataatacccttagtttctcagaggctcatctgtcctacagtgcttttcacggcaccaacgacgatctgacggatgctgccaacggagagacctttctgtccggcaattggcgcatggacggaggcaataagttttacagcaccgccaccatggcccggtggtatgggccggcttatgaggctcaggtacctttttcctggctggatttaagtgacagcctcttaagtgccagaattgacaaaaaggctggcagtgccagactgaataactgttattggctgccggagatcaattacaatgaccccaacacagggacagaggttttccgtctgtctaagattgaagatatgaaggcctttatttatgaaagaggggccgtagaagctgcattttatgcagagaaggacggcgggccttatgacgctgccaccaacagtttttataatccttccccagtggcagccaatcattccgtggcattggtggggtgggatgacaataaagtgacccaggccccctataccggtgccttcctcattcagaacagctggggagaggaagcgggagaaggcggttattactggatttcctactatgaccgttctctgaagaatcctgccttctatgatatggatacaggggaggatgccttccaggagaatatcctccatcaatatgacggaacgggatacaattcggtcattgcccgtacccctgaaaatatcgcagcggattctggggagagactcaccggcgccaatgtattcacagccatgtccccccaatatttgtctaaggtgggcttttatgcaggggccagcggcctgaagtaccgcatcgacatataccggaaggtgaaaaccaccccggacacaggagaactggtgcagacattgacaggacgtaatacctacagcggttactataccgtggatctgggagaactgatccctattcccaagggagagaagttcgcagtatgcctcacctttgatgatccagcaggttatctgccccgggagaaatccacggctaaatctgtatgtcttgcagactacggccagagttatttaggggataaggatggctggagggacttgatgagctttcctgatctgaaatgcaatctgtgtataaaggccatggggatctctgcccctgcctctgaaattgatatgcagcaggttcctgatgcacctgtgatctcttctgcctctggtgtaaagaataccgtgaaggtaaccgttgcaaaccagtctgtggctgtggacggttatgattatgtattaagcaaagaccgaaattgtactcagaacaacaattttctaaagaagaacctgggggtggcccaaagaaccacccagttcaccagcgtccagaaggggacttattatacggctgtccgggcttacaagtataatgagaaacaggaaaaggtctatggtccctggtcttctctgaaaatcgtaaaggtgatggcagtgacgccgggggcgcctgagatcaaaaaggcatctgtatccaagcagaatgtgactgttcagcttggagcaggaaaaaatgcccagggttatgatgtgtatttaaaggaaaaggtgagtaagggcactggaaaaacttatgcagtgtacaattgccgttccctgaagaatacatttaagaatgtgaaaaaaggtacctatcaggtgagagccagagcctataccaaatatggctccgccaaaatttatggaagctgggcaaagaccatcaatgtgacagtgaaataacctgttctggtcccagagtccggcctatttggaaaaaactgaaataacggcaatgcgcctgtatctctgtgaattttaaccacacagggatacaggcgcatttttatgggctcaacccaggcagagaatcctgccaggcagaaatttttttactatagtttaaaataaatatattttatatttgacaatagtgtgtgacatacagtatactatccttaggaggtgataagcttgggtgaagagaaggacttgcttagcagtctgcttttggagctgcgcagaggaacccttgtgctgagtgttctcagtcagatgaaggagcccaaatatggctatgctctggtacagagcctggaggaaaagggaatttccattgatcccaataccttatacccgttgctgcggcgtttggaaggccagaagctgctggagagtacctgggaaactggaggttccaagcccagaaaatattacagaaggactccctatgggacagaaatatatcaagaattaagcagccaatggaaacagctttcacgaagtatggaggagatcttaaaggaggagaagacatgaatccaaaagagcaggaattaatggagcgctatatttatcaagtcacccggcatctgccaaagaagcagcgaaacgaggtgggactggagcttcaggagctgatcagcgatatgttggacgagattggttccattaaggaggttctcaccaagctggggaatccagtggagtttgccaagaaatatcaggacaccacacattacctcatcggcccggaatactatgacacgtatctatggtttctgaagattgttgtagcctgtacgattttctcaatcctgggagccacgatccttttggaggtgcgggataccttgaaccataccgatattctccagttgaatacagtccttgtcatggtgatttccattatggctgaatttttaggaaatgggattatttcctgtatggcggcagtgggaggggtgaccctggtctttgttattattgagagacagaaaattcaattggacataaaaaaagccaaggaatggactatcgaagatctgggagacaacttttccagcagcaagaaagtatggacgccggaatatctggctcccatccctcacaaaaaggccatgctcagccgtggagacagcattgtaggaattgtttttatcgtgattttctgcgtgtttttaatttttgctcccaatttcttttctgctattttccgtggggatcaggagcctgtcatcatcccagtgtttaatctggaaaagtggaatattattcttccagtgtttgtcatcagccttttgatcgctcttgccgatgaagtggtgcggcttgtggcaggatgctactgtaagctggtgatggtgagcaatattgtatgcggcgttctgcagatgatcctcagtgtgatcgttttgaaggtatttcccttctggaatcctacgtttgctgcacaggtgcaggttcagctgggagatcagatgaataaatttgggaaatttctggctaagtgggacacagacgttgtgtcaaatgtttttctggcttttatctttgtggtcaccctggcagaaattggtgttacggtatataaaaccctgcgttatggagtagaacggtaagacttaggcgcagatttcaaaaatgaaaagccccttatgatcaggaactgtccacacagtcagaaaccataagggggcttttatttattgttctttttctaaatttaaaaccataatctccggcgggctgaaaagccggaaagggatcacggtcataccaattcctttgctcacatacagagaaatattctcattgatccccacattctcatacagtcctttgataaacagcctcccacctacaggaaggatcctgtccgtgatataaggaaggttcacctgtcccccgtgggaatggccggctgccataagtcccggctggtccatggaaagatattggacaacgtccggctcatgggagaggatcagattataatcctggcttttgatctcatagagagagggggctgtttctcccagaaggtagtcatcaaaaccgatgagccgcagattcagctcctcaataaaagcattttcattccgaagtacgaagaagccgccattttccatgagctcctcataaattctcacagcgcctcctccatggtcatggttgccgaaaatggcataattcccatagctgctctgtatgcgtccaagctgtccgctgagataatccaggtcaagatcctggatatccctggcatagttatccaggaagtctccaccaaacaacacaagatccggattctgggcattgatcttatctacaattttttcaatattcttctgatcgtacatttctccaaaatgagtgtctgaaaaatagacaattttgcagtctgcaacctgaggcggaacctggatggtatactctgtttttgtgagcagccttggctccaaaaagcctgcatagagaaaaagtccgataccaagggcacagagcagtaaaatagctttcaggataccccggaaaagtctcatcaataggcgctcctttctattttttatattggtgttaaaggacattttcatccaatataaaagaaacagcggaaatttgcaaggcctcagagaatattttataggaatttaatgttttttacttttttcagagtaaagggatggccagaagaatgcacacggcggctccagtcattttggctgtatgaaaaacttctgcacagtttctgccagccgctgtaaatctttctcatctgggtgggagagtgcctggtcaaaatttttgatctgtgcctgcagcttgtccggctggtgggcatacattgcctcataccggtctttcactgccgaaggcatcttaccctgacacatgaaggtaccggatatggtgttggagctgtccagattggatgccgtccggccaagaatctgggtaaaataagcggtattcccgccaaatccggcggttccgaatagaaacacgttcttattcttcaggctctttaaaaaatctgttgaaatttgatcgcaggttcctttatctgtccaaaagcctgcaaagatcaggtctgcttccagggcctcatccgctggaagtccgtagtacacacagtcccctttcggaagcacagcctgcagcttctgggcaagcagggccgtgtttccggttctgctgctgtagacaattgaatacttcataaatttcctcctttttctgggaacctgcttacagcagctccctgagcttttccacgtggatttggtacatcttatctttttccagtgaaaaatatccttctcgttccatttgttttagctcctggttcaaagaagagcggctcacatgaagcagatttgcgaaaattctctgtgaatgaggcggggacacggtatgttctgtctcaagcctctgaatccctacaatccaataggcgatccgctgccggatggtctggtaattcaggcagttgagatacagttggtttttcaggcctctttgagatacataacacaaaagggcactcataagctgggggtcctgggtgagcatttcttctaagatgtcaatgggtatccatactacagcggcctttttttctacgtaaagcatatatgtatagcacctgtttcccgataaatacagaaattccggaaagctgtcctcttcttcaaaataagcgttgcacagctcctgtccatccctggaataggtgaccgctttcaaaactccaccagccacgattcccaaatgggtgatctctgcgccctcttcgtgaatacattcccctgttccataggttttggtaataaaaaaagagcggtatttttcatatcggctgtcttccagacacagtctggcaaaggaagacggttcctggattttagaaaatattgatctgtgcatagggaatccctccttaacagaccataaggaggcaaaaaaacagttcctccttatggttattggctgctatatcatctgcctaagcatgctttttaaacaaattcatccaagagatcacaaaggtcgtcgtagtccttttctccattaaagcgggccgcctctgcaccgtccttatagatggcaaccacaggtattccaccaatatggcaggcctgtgtcagatctggattggcatccacatccacatagcgcacagcatactggccttcaaattcctcttttaaggcttcctccagcacaggatgaagagctttgcagtgagtgcagcgttcagcgccaaacaagaccagaaccggagttttctttaccttgagcacatcggtgtcccaattctcatgggtaaccggccggaagaactctttatctacggaaaaaatcttttcctttctggtcaaatcctcttcgtcatcggtagcaacacataaggccacatcttcataatacggcagagttccctgaacatcaacaactttttttgcgccaaaggcaccagcccctggaacccggtaggtaatgttgtctattttttcaatgggaatctcctggggacggggctcctggggaacatagctgtagggataacggtaggccctgtagatcatattggacttgggtcctttggaattgtgggtgtaatagggggagatccactcccacacaatttcatgatctggcgtaacctctatgactctgccatccgacccttcatcgatgagggtgttgccgttgggcagccgctggatgctgctcacataaggactgtaaaatttgctggcatcagtgggaatggcgtggcccagctccttaggggtaagcttccatactacctgaagggtaactggatcgaattccagaacacggctgtaatctctttgtgcatttttggcacctattaaggagccaggattgggaagaccgtacccagcccagccgccgttgtcaaacaccagaaggttgccctctccaggcagtcctttggggatcatatggaagtgatgctggccgatgatccatcccagactgcgcagctttggagaagcgttgaaatccggaccgattttccatactacttttcctgactccttatccaaaattgccaggatattggcttctctgcagtcaaaaataatattctcaggcttaaaccgggtatccccctggtcataccatttgttggggcccaggctgctcatggaattaatgtgaagataatcccccacacctccgtcgcaggcccgcagattgggatctcgaaacagcacatttttagccgcctcgtcaaatcccagttcatcaaaatgatcgctggcagaccatttccagagaatctttccttcccagtccacctcgatcatcacatcatccaaaagctttttgtcagaaatccggggatcccgtatggtctggtggcacaggatcaaagtgtttccttccaaaggactggcatccatccctggcacatagtatcctacgggattgccctcccgttgataatcgtggtgctgtctggccatccagcggtggtcacggccagggtcgttgacttcctccaaatggtcaaattcccaaataatctttccgtcataatcaatttccagcagatttacaccatcctgcattccgtagtctggatgacggtatccggaaaggcccatgatatagcctcccggaagcatttttgccggcatggcctgcatattccagcggcggatttcatttccgttcatgtcaaacaacagcaccccgtcattgatcaggggaactaaattatatccgttccaacatttctcaggattgtaaacagtgactccatgtggaaaaacaagtggctgacccataagtatatcctccttttttacgtactgaatttaattagagtatatttccggcggcttttatcttagtgagcttacccttttcataaaaggcagcggacacggttccttttatgttcagctcccggtataagaggtcctgtctggaaatatcctgcttgtaaaccttccaatgactgcccagccttttttccaattccccggcttgtgcaatatcggaactttcatagggattgtaaaaaatgaatgcaattttttcagcaccctgggacaggatttcctgaatttcagtgagctcctttacataacgctctgatgcagtggcagcaaccgccccgtcagaagcagaagtgaccacctggcgcaggaaggtattggtacagtccccggctgcgtacagtcccggcaggctggtctgcattttgtcatttaccttaatgtaaccatttctatcacaggataccaaatcctttaccaggtctgtctggggaaccatacccacaaagaaaaacagaccgtcagcttcaacctgagaacattcctgggtaattacatttttcagaaccagagactgtacatggtccgtaccccttatttcctgaacggtagtgttccagataaagtgaatcttagggtttttgtaagcccgctgtgcggaaatttcattacagtccagatgcccttcctcatggaggaccaggatggttaccgaggaagcgaacttggtgaggtaatctgcctcctccaccgcctggtccccggctcccaaaacataaatgtttttgccagtgaaaaactctccgtcacaggtagcacagtaggccacaccatgtcccgtaaattcctcttccccgggaataccaagttctctggggcgggttcccagcgccaggatcaggcagcgggcagtgaatccgccccttcttttggtgtccaccagaaacaggccgttttctttgcggattccggtaacggtggagtgcttaaattccacactggagaagctggcggcatgggcccggaatttctccataagcccttgtcctgtgtcagagaggatgcccgggtaattacggatttctccggtgtccttcacacgtcccccgtagccgcctttttccagtaccagggtatctctctgggaacgtccggcatagattgctgctgccatgcctgccgggccgcccccgatgatgatcagatcatatattttttccatggtgaacccttcctttctgtgggtattgatccttccttatttttatattctagcagtttggtaagaaattacctgttggagagccaacaggctggtgaaaaacttaacggggacagggagatgaatgatgtggctaatgtgtggaaataaagagagcataaaagaaaacagattctgtcacaataattacagtttatgggaaaatctgtcacagaatttatcacatgctatactaaaagcagcaaaaaagacggcatcagatacagacagcaggtgctgtcagccaagagggaggtttcaaggatggaggcacaggtattcaatccatatctgcctggatatgaatatattccggacggagaaccccatgtatttcaggacagagtctatgtatatggttctcatgataaatttaatgcgcccatattctgcgtgaatgattatgtttgctggtctgcaccggtggatgacttagctgcctggaggtacgagggggttatatacaagaaaaaccaggatccaaaaaataaactgggattacggctgttgtttgcaccggacgtggcacagggggcagacggtcgctattatctttattatgcctttgactttatggggatcatcggtgttgcggtgtgtgatacacctgctggaaaatatgaatttctcggacatgttcattatccggacggaacccttctgggaagaagggcgggggatcactttccctttgacccaggtgttttggtggatgaggatggaaggatttatttgtattctggctttgccgtgtccattccttcctttgtcaccggcttttgcaggttgagaagtgacgggggaacggtagcagagctggataaggatatgctcaccatcaaaaaaagccccaagcttttgttcccaaaagaaggacaaggctctttttcagggcatgaattttttgaggcaagctccataagaaaggataagggaacctattatttcgtctattcctctaaaaagaattatgagctgtgttatgcagtgagtaaacggccggattccggattttcctacggaggaattttggtcagccagggagattttgggttaaatggaaagacgaaagagaaggatggggtgaattatcttgggaatactcatggaggattgctaaagcttggagaacagtggtacattttttatcacaggcagacgaaccggcattcctattcccgccaggcctgtgcggaaagactgttcacacggtgggacggctccttttcccaggcagaggtcactagctgcggtctgaataacggtcctttgcgggacagggggagatatgaagcgagaatcgcctgcaatctctggtcaaaggatggtgttggccgctacgactgcaggcggccaaagaaaagattcgcagggcatccgtattttacccaggatggggcagacaatgatcagcagtcccggcagtatattgcaaatatgagagatggagctgtggctgggtttaagtatttttgcataacaacccccaagaaaatctctgttgaaatcagggggaaggccagaggcaagattgttgtggcagatgaaaaaagcttttcaagaattgtggcagtgatccccattgatatacaaggtactcactggagaaaatttgctggtgatctgagcattaaagagggaaggaaagccttgtattttcgcttcacaggaaagggcagtgtggatttcctggcattcaccatccactgagcctttcgtgggagcggtgaagcttcaatcctccctcagcttcaccgcagaggccgcctggcgccgtctggcgtcatccagggcggcgtaatgctttttagtagtatttacatccttatggcccagcacgtctgccacaagataaatatctccggtctcctggtagagggctgtgccgtaggtactgcgcagcttatggggagtgattttttttgtggtggtgatctggcgggcatattttttcaccaggttttccactgcctgcacgcccatacgcttgcgctgggtggagtagaagagggcgtgctcatgtccggccacaggagtgatcccctttcgcacctccagataagctttcagggccttttccacctcgtctccaaaatatacgatcatttcgtttccgccttttcgtaccaccttaatgccattgttcttaaaatccacgtcctccacgtccagtcccacacattcagaaacacggatcccggttcccagaagcagggttaccagggccaggtcccgctcctttgttttttcataatagaccttctgctggccgctgagctgatcgccgcagtgttccatataatccaggagcatggccacttcgtctgtgtccagacgtataatacttttttcatggattctgggcatgtcaatgagcaccgtgggattggtgtggatcatttctcttttataataataagcataaaaactgcgcagagatgccagctttcttttgatcccacgttcgccgtttgtggtctgcttatggccctctttggattggtacaccttgagatattccatgtattcttcaatatcaagagcctgaagcttatccagcatatctaatttgatatctcccatggcgcagtttttgaacagagggttttcttccattagatattgaaagaatattcgtatatcataggcataggacagccgggtcttggcagtggtagtcacttcgatggcccggaagaagtccttggaaaagggcggaagagtggcaagcacttcccggagctttaaggtaagagatacctttgcctgttcatgataacttgtttttttgtccatttcagccacctcaaaaatacttttctttatatatgactcaagagtatcattttcaggggaaactgtcaatctatacgaaaaacccatcttgaatatttgagttgtgcctcattggggataatacgaaaaccaggtcaggaatgtacctatcacgtcaagaataagcataatttttctgtcagaattttacaaaaacaggacaagaagcttgcttgtgtttacaggcttaaaattgtatagtcttctcataagaaacgcacaacaaaaggaaagagaggacattgaaatgaaaaaaatgattatgatgggcgccatggctcttaccatgagcattgccgcttcaggtctcacggtatttgcagaagaggagcagcttccggcaggtgtgtttgtggaggagagcgcagactctgacacgggctacagcattacgttccgttactacaacgaggatgcaaccaatgtacaggtggcaggtggcttccagttttatgaagaaaacgcagattatgcatatggggccggctacaagctggaggagggcgacagctttgacgctcatctctttactccggaaacctggacaaaagatggaaatttataccatgtgaacgaccaggcgtgtattcttgatatggaaaaggatgaagagagcggtgcttggacgtgctccgtagacctgaccggcggctggtatctgtaccagtataatgtttcctataatgatggcggacattatgacagtatcacagacccggagaataagcccccctgcaattccatcggcggacagcaggtaagaagccagttctatgtaccatacaatgaagaaaagcaggctccccaggatgactggacctggtccacagcgccggaagatgagaaggacagagggatcctctatcatatgagctacgtaagtgctgacaatgtggtgcgtccagtggagattgcccttcctgcaggctatgatgcagaacgggaagagccctacaaagtgctgtatctgtcccacggaggcggcggagatgaggcagactggaattaccagggccatgcaaaggatatcgtggagcgtctcaccgcagagggtgtatgtgaaccatttattatcgtggcaatgaataattctcagtttggctgggattatgatgccatttatgataatacaaagaactatctgattccttatatagaagaaaactacaatgtatccaaggaagcctccggcagagcatttgcagggctttccatgggtggtatgaccaccagtgagctgttgttccgcgatcaggagttgttcggatattatggaatcttcagtggttctgctgtgatggatcttccaaagcttgaggattattccagctacaaggttccaaatctttatatcgcagcaggatgggcagatatggcttatataaatgacagctaccagacagaaggagaccggacctctatgggactggcagaaaaatttgatgagctgggcattgagtacaacggcggcaatggcattgatgttgtacagggcggccatgactggtttacttggccacagattattaaaaattatgttgaaacgactctttggaaataaacgactgtattcttgaccaaataaagataagagctttccaggcaccttgaacttattcattcaaggtgcctgctttatgtttcttaccctttatctcaatattttcttaatttcgctgatggtcagtccggtctgttttttcatgagtctgtaaaaataggaaacgttcagataacccgtctgctcactgatctcctggacggtatgctggtcattcttcagcagctccagcgcctttgccaggcggatgttggtgagaaccccaagaaaggtaccgtttagctcctgtttaaatagtctgctcagataaaagctgctgattccgatttcctctgccatctgctccagcgtgagattttccatatagtgcagacggatgtgggagaggctcttttgaatataacggtgctgtgaaagagcgccccttgcagcaaacaattcatgaaaaagctggtgaatacaggataccagcgcctctgtatctggctgggtaaagagggagctgtattcattgccggatagaaaaagcatttccttttccggacacagggattgaactgccgtgtacagaaaatctgccgtcaaggtacccagggcattgatggaaaagcccgaagctttggcactggaataaaactgctgcagcagggcttcacaatccctgaggctgccagcttccagaagagagcggcaccgggaaaagacctggcggggatggagaccagcggccggccttgccaagggctgataaaagaaaagccctggtttcatactcccggaaagggccagcctgctttcctgtactgcgtcacacagttcccggaatgtgtatttacaagtgctcacacccacaaatagctcctcttttccctggagggcaacgcaggacaatgtttccaagatccagcggcagccttcctcctgggtgagaggaaggggtgggaagacacagacgatcagggaatttttatagattttcccaaagctggtgctgatttttttcaactgcttcaaaaaagatgaaaaataagcctcctcctggctcttttggttttttggcagacgcacacacagaatcagtccttcgtagaatgactggttcaaatccgacaggtatgcttcatacagatggggatgtacctctcccaaaagcaagtctgagatcagctcattttcctgctttatttgataattccaggaaatagcctccatctcatttttctttttctgctgctgtttttctgaatccagtttttcacaaagcttttgaatactggctgccagacgctgacaggagactggcttaagaagataatcccaggccccaagagagagcgccttctgggcatactcaaatttgctgtaggcggatacaatgataaaatgagcaggaagctgcttcaggtttatgatctccatggcatccaggccgttaaagccaggcatgttaatgtcaatgactgcaatatccggctggtagttctttatgctgtttattaattcaattccattgggcgccccaggcagaagctctgcgtcgggaaagcttctttgaatcattttttccaaaaccttgcgttccatggcttcatcgtctgctacgattattcggtacatgagagttcctccttcttgggacagggaatttcaatacatacctgggtgtgttttccagggtcgctggtaaaatgtacgctggactgtccgttatagaaaagcttcaaacggaaggcaatgtttgccaatcctatttttccggtggcaatctggttggatttaagcttttgctcaatcctggctgtttcttcaggggtagtcccctgaccgttatctatgatccggatacagattttcccctgggaaggatccccggaagtgcagatgcggatccagccgccctgggtatacatccctacaccgtgtatgatggcattttccaccagaggctgaagaatcatatttggaataagcacctggtgaaaggactcgtccaattcaaagataaagcggatgcggtcaccaaaacgtttttcctgaaggtagatgtagttgcccagttcctctatttctttttccaaagtgacggctttgtctgaatagtccagaacataccgcagaaggctggatgtgatatccagaagctccacggtctcatggtcgtcagccagataggcagagtgggagatcatggacagggtattgaacaggaaatgtggattgatctgcatttgtaaattttgaagctggctttttttcagttggttgctgatttgaaggcgcaggttttcctgttcctgaaggcgcagcttggtgttgtgatattcctcctgctccagaaactgctgtctgattttttccaccatggaattgtaggtctgtatgaggagtgtcacctcctgatttgtctcctccaaagaggcttcttgcagagtatggacgcagtccaggtggtgaaggtctatattctgtacatcctgggccaggcgctggatgggccgggcaattttttcttccatgtttgccatctgtaaggagagataccgaagcagtaaaatcacggtgacgatcatcaagaaaaggaaaaaggaaaaattgcgccaaaagagcaacgtggcctgcttgctttttgccaatacctgagaatagagggtatggaaggtatcatacatgaccatataggtattgttggcctcataataggcctggttgatctcctgacgtccagccccatcctgaacaagggccaaaagccggtgcagctgctggctgtagttttccatcataccgccaagatccaggacatcccggtggaaagtggtgctcacctccaaaagaagaatcttggacaaggtcttgttcagggttttcagctgatcgttcatctgggaagccagggagtcgctttgctccaaagtgtactcatacagaagtttttgttcatcccaaagcccggtataaaaatcgtttaccagatagatccggcgggtctcctgttggttatgaatggaggaaagaaaataaaaacagatggtcatccccagactaacgataaccaccaaaaaaatttgatgcagatattcatgaagctctctgcgtatggtgttcccttgtgtgtttttcaatacatatgccactccaatcccgtagataggtcagatttttcagtcttgtaatttgactggttgatgcatgtgctgggtgtataaaccacatctgccacttcctttccatccagcaggtcattcagggtctggacggccagatatccctgaatatagggctgctgcacgatcaaggaatggtaaaagccctcctggaaataaccaacagactcatcggtactgtcaaaggcaatgatacaaaggtccccaggtaaaatcccctgctccttcagaatgcctcccaccacagaggaggaaatggcttctgtaaggtacagtgcgttgatatcaggattttcagccagaagccggggcagcttttctttcacctccagcttttcagaatgacattctgaaatggcggcaatggtcatttgtgggtaagcttctatctgctggcaaaagccttctattcgttcctgttggttaggagaattaagagaggcggtaataatgccgatcctggcctcaccgccggtggcctggaacatctcatctccagccaaagcccctgcttcctggttatctgtaccgatgtagcaggaacgccgggaatccggtatgtcgttgtcaataacaacaacggggatcccctgggacaccgcctggtctaccgctttctgaagaatcttggaatttgccgctgccgcggtgatgattccgtctaccttggcaaggacagcctcgtcgatggcctttgcctgggccttaacatccagctgcttcataccgatcagctttgtgtctgagtcaaactgttgatcagcagctttaatcccggaggcggcattgtcccattgcagaggacagacaaaggtataacgcctgccaaaggactgggtggcggatggagtaaggatactcatggcaaaaagcatacacaggataaaaaagcagatgccgatcagcacctttagatgttttgtggatttcatggtgtatggacgtcccttctttataagctgtatttatcggacaattgttgtcaggtaagagataatgtattaatattgatggaaataatataaaagtttgatataattataaaatgaaatgcacacagatgcaaggaaagaaagagattccttgaaggaatcaaccccaaaaggaggtaagacggcgctggccatccggccagtgatttggtacaatgaagttattccattacagtgaatgtacaggcaattctatgacaacagtcttgcctggggcaaaggagacagaaaaggaaatgacaaagattttatttatggaggacgaacccaccatccgggaggtcctggcagaatatatgaaaatgcagaactatgaggttacccaagtctgtgacggggaagaggccataaaggctctgaaggagcattcctatgacctggcggtgctggatatcctggttcccaagatcaatggcctggaagtgctggcctatatccgcagagaaaatccctccatgggcgttatcatgctcactgccctggatgacgagaagactcaggttcaggcattcaacacctatgccgatgactatgtgatcaaaccagtttcacccattatccttctgaaacgaatggcgaccatcctgcgcaggaccaatagagcccaggaaaccatggagcaggggcttgtgatccatcccaacgcttatcaggccttttatgagggaaagcccttggagcttaccctcagcgaataccttcttcttcagactctgtaccaggaaccctccagggtatttaccagagaacagctgatcctgcggatttttaatgaggattatatgggaaatgaccgtatcatagatgcccatgtgaaaaatctgagaaaaaagctgcctaaaaattatataaaaaccgtgatcggcgtgggctatcagttctgccccaacccttagaggaggaaacatccatgggactgtccaagaaaacttttttatacagcatctttatatcctttatacttatggtctttgtggtcctgtatttttcccggatgcttccttctctgtacgtagcatatatggaaaaggacaatcttcaggccgtggtgaatatgcagaagggctatatgaaaaaccgctcctatgaaggactggtgatcaaaaacccaaccggatctctcactgtggagcttccctatgtgggcagctctgtatatctaacaggaatgaacttccagattacggctaagatcaaggattctctgctgaaggataccattactcagcttcgggataccttccgcgatgtgaaaaattttaaggatatacaagagccggagattgattttgagaaactgaaggaggagctgataccggatcatttgctggatgattcttatccggtttcctttcacgttaagctggacgaggaaaccaccgaatatcaggaaaaggaactaaaaactcatgtaatttcagattccatcctggtttttgaagggggagtgactgacagcaataatgaatatacctcctacattgccctgggaaagactgccgatgccctgattctttcctttctgccggtgatgactccccagatgaaggagatcaagtccattgtctttcagagcctgcctatgctcacagccgtggtgtttcttctggtactcattgcctctcagcttttttccagaaagatcgtggttcccgtcatccgtctggccagatatgcccaggaagtccaatgggccgacaacctgttgctttcaccccttcctataaaagaaaaggatgagatcggccagcttggaaggatcctcaatgagctctaccaaaaactgcaggtgcagtaccgggagctggaggataagaaccaggctctcaagctggagaacaaacgacaggaggttttcctgcgggcctcctcccaccagctgaaaacccccatcaccgccgcccttttattggtggagggaatgctcaatgacattggaaaatacaaggacacgaaaaaatatctccctgaggtaaaaacccagctgctgtccatgagaaagatcgtggaggatattttatatctcaatcactgtgcagagcatctggaaaaggaggcttgtgacatggaagaattagtgggagaggtgctggaaggctatgaggtccaggcttcctataagaagctttcagtgaccagaagctttcagacccctcttttatggaacacagaccgggagatcatgaaaaaaattctggataatctgatttccaatgccgtggtctacaccccttccggaaacaagatacgtattggctcaaagggagacgtattggaaatctacaaccagggtgcctttattgaggagtcccttcttcctcacatttatgagccctttgtcagcagtgacaccaggcagaaggggagaggactggggctgtatgtggcctcctattatggagagcttttaggactgaaggtggagcttgccaatgaagaccagggtgttctggccacagtgcgacccaaagagcggcccggacagcatgactggaattcccagccggcacagccatgacacagcccacaggcaggacaaaaaattctcacatcctgcacaggaccttcatttcatcttcacatgggcctgttataatagcagtaacgaaaacaaaggaagtgacacccatgcttttaacaattcaaaacttgcaggtccagtatggaaaacagacagcccttcagatccgctcccctcttgccattgacacaggagagaagatcgggatcatagggtccaacggagcaggcaaatccactttggtgaaggctgtactgggacttgtgccttacaaaggctccatccataccgcactgaagccggaagagatcgccgttcatatgcagtttaataattatgcctccaccatgcctgtgaaaatgctcatagagaccttgatgaataccaaaataaaaaagaaccgccagcttcaggagctcattgcgtattttgactttgagaaatgtctccataaacgatattcttctctgtccggagggcagaagcagcgtctgacgatcatcatggtaatgatgcagaatgccccattgaccttttacgatgaggtgacctccggtctggattttgagaccagacagcgccttatggaaaaactggccgactggtacaaggacaaagcgaataccctttgtattatctcccattattatgaggagctggagattctggctgaaaaaatcctgatcctggacagtggaagagtggtggactatggaaaaaaagaggtcttgtttgaaaaatactgcggaaggtccattttcattgtagatcaaacggagaaaaacagaaatctccttgcagattttcccaagctgtgcgcacctgaacatttaatggcgcttccctgtacagatcaggcttctgaggagcggctggcgtccctgcttctggaggcaaatgtgaattttaagcggagcaacagtgatattgagatcatgtttctcaatgccaaggctgcctgtgagaagggaggcactgtacaatgaaacaaaaacgatgtaattcggggctggtattttatgaggtccttaatattgccggaaatccttttactgcctttttcggcattgtatttccagtgttaatgctcatgcttatctccaatgtaatgaaaagtgatgtcccggcatctatggtagcaaaagtaaataccggcattttcattaccatgagtctcatcataccgctggctatggtgtttttgggctacactgccatttattcccaggagctggaaaaggaaatacccgtgcggatgcggctttttgggtataaggagggttccatgatcctggctaagatcattgctcagtttcttacactgactctgggtcttgtgatttacacggttgtttcctatttggtactggatctgcagataccaaggctgtcctcagccctgtgccttctgggctgtatttatcttctgggagctatgttttttgccattgcccatggaatctccagcctgttaaagaaattcggccctacctatgcactggtcatgttcttgtatttcggcgtcatggtcctgtgcggcatgatgggcgtacagaccaggcagctcccgcaatttcttcagtctgtggcagctctgcttcctatgagttatatcagcagtgattttatcgatttctggacaggaggcacctataattttatgcctatgatccaatcctatttatttctgggggcagtgagcggtattttgctggtgttttccacgtataagaatagaagagtgctgaagtaagaatcatgaatatgagaaacaggcagttcgtccaatgtgggttctcacagaaggaatatcaaattctgtaagaacccaaatatggattggctgcctgttttttgatgaaaggattcttttttatatggattacataacattattatggtaaatataatattttaaaacttatacttgacaatgcatactatgctatgtatactatgtatagtatcatatttaatacatagtatctgtaataatgaaaaagctttcaataagaatggaaccttagatatagaactttttattccaagcttttggaaaggagagcagatggacacacagagaaaaaaaggctttttggatgtctgtgttttatccgtcctgaaagagggaccttcctacggatatttgatcatcggagaggtatccaaatgcatcgagatttctgaatctaccctgtatccgctgttaaagcgtctggaaaccacaggctgcgtgacaacctataaggaagagtacaatggacgtacccgtaaatattacagaatcacagaagccggactgaaacggatcgatgactttctcggggaatgggaacagatgaaaaagatttaccaatttgtacaaggcaatctggcacgacaggaatctatttaataaaagaaacaggaggaaccaatcctatgaaacaggaagaatttatagctgcacttatgagtgagcttcgagaattaaatgaggaagataaagatcagctcaaagaatattacaacgaactgatcatggacggtttagaaatgggaaaagcagaagaggagattatcgcagaattcggtcctccacaccaggtggcggtgcgaatccggcaggaatatgcagaatacggacagtttctaagcgctctgcctgaggctgtaaaaaacaaaaaggcccaggactatcaggctgacacagatattgacattcacacagttgtcatcgaggctcagaatatccctgtagaggtgatccaggcacctggaacctctgtacaggttcttttttcacccaaggacggaatcgacgagatcacgtcaaccaccgttgacggagtctacacctttacacacaaaatgcggtcccttttctttttgaatctgagtatcaacaatattttcagctggatccagggtcagcgaaaaatctatgtggagcttcctgcagattttaaaggaaatctctatgtgaaaacctccaacgctgctttgactatcaaagtattacaggggctggagaatggaaagctgatcaccagcaacgccaggatcaatataaaaggaatgaactgcaaatccagttctgtaaagaccagcaatggccctgtgaatatggacaatgttgttggaaatgaaatggaggtcacaaccagcaatgcccatatcacagcagaaaactgtaccatggcaaacggtttgatcctcaccacgaaaaacggctccatccacgtcagcaatctggaaagtgacaaaattgtgctcaaaagctccaatgcagccatcacaggaaccatccggggagatatgcgggactattccatacagagccgtacctccaatgcacccaacaatctgcccaattgttcttatcccgaccagaagaaggacctggtggtgcataccagcaatgccaggattcaagtacagtttgtccagtagcggatactgttaacagcggcaggtggcagcccacacagaagttgatacatgtcacaagaaacgaaatagattaatgaagagaatgtccctcatatataatccaagaagccggcggatgcatgggaaaaggctgatggtataatgaggggctttttcttgtgaatacacatataaagtcctttttctatccatctatttgaaaaacttgagtttgtcgtatagatatatccagaaatgtaactgttctttcaagcatctttatacctgtcgatcaagttgcccaggacccacagccgactttttatacagtacgcaggcatagttatttgtttacgcttctccagaactccatatatgataaaaccttcgcctaatttctcagcacacctcattacaatttaacattacaatttaacattacaatttaacattacaatttaacattacaatttaatggccagaatccctgaaaataaaatcgctgtccattgtacagatgtactgaaatttcagcgaaggttttccccacaccaacatacacaaactaatttagaatttcttcttattaaatataacagccgccagtccccaaatgatcaccccagacacccccacagtgccaaaggccttcaggtactctcccaccgatgaagctccggtgagcagacggtcggcctgaagcagtcttgtgggcaggaaggctgcagccccagggatcaattccaacagataacaggcagcaaacaccgcacctgtaaacaaaagtaccggggaggtgctcttgaaaactgccgaccccaggaaaatgagagagatcagccagattcccaggacataaatgcacagggaggcaaaaaacggatggcttacctgtgcattgtcccagaaataactgttatacccaaaggtaactccataggccagccagtgacagccgctccacaccagaagggtcatgatccctttccctgccagaatcttccatcttgtcatgcccttggtaagaatgttgatcagggtccctttctggtattcattgaccagaacccctgaaaataaaatcactgccacaatgagcatgagagaaatatttttataatattgctgccaggaggtcagggcattcacggttatatttttaatgatgatcccctgctcctccatggattcggacagtgcttcatagagccacggagtaagctttgccagtgccggattcatgatcccgaagaggaaaaagaccaatagagaaagatacagccgcccggtgcgcacattttccatccattcctttttcaaaaaggcatttaactgcttcatttctcgatcacctccataaacaaggcttccagagaaggctcgcacatctctatccgtttgattagaacagaattgtccacagccgctttcatggccctcatcatctctttttcatccctgccttcataaaagagctgggctgcccctgtccgctgccctcccgggtatttcccctggaaggccttcagctccctttcatttacaaaatcaatctcaaagccctcatgatgccccagattgtggatctcatccatggtcccctgaagggcgatttttcccttatgcaatacaccgatccggtcacagatcctctccacgtctgacaagatatgggttgagaataaaatggtggtccgctctctcactgctgacaaaatgtctaatatttcctttcggccaatggggtccagggctgaggtgggttcatcacagattaaaagcctgggttctcccaagagtgcctgggcaatccccagacgctgcttcattcctctggaaaatccctggatgcgctttgtatggccggaaagccccaccaggtccaggagctgtggtattcttgttttctgcaggttttctgtgattccggtaatctctgcgcaaagcttaagatattctgccggggtcatatatccgtaaaattccggcacgtcagggagatagccaatatactgattggtgcggttctgcccataaaccaccttttccccatttacatagatttctccctgatcacaggggaacaggcctaagatcattttcatggtggtggtctttcctgcgccgttttttccgataaagccgtaaatctggctttcctccacacacaggcacagatcatcaatcacctgattgtttccaaatcttttggatagatgagatatgttcagcatttccatttaagcgtcctcttttccaaaaagaaaatataaaattggtccccagaactgcattcctacgatcaccaacaccatccagaaggttctgctcccttttttgtaatggtcatgggtaagaacatgccggatggtaaaaatcagcaaaagcagctgggctgccaacaacggaatcagaaacggcagtaattcatgaatgttcataaggaatcccccttccggtcaaccagtctgaccagtgtgttatattctggaagctcaaaaagctgagaaaatgccggattggcaagtgcctgccgcaggctgtctgtaataagggtgagatctctgggaggctggccgcctaagtccagcttacggatgtattcctccaaatgggtaaaatagctgtctccgtgaagatctgctccgtcttttaaaagcttcaggcctccctccaccatattctgcaggtgctccaaagccttgtctccttccttgtgcctgcagtagaaaagcgcacagacataatgaaattgaagtttcgtattaaggttcagctccttgagattataggcatccatcactgtcagaacccgccggatggtctcctctcccttttccctgtcctccatggtcagcagcagatattggctgctccctcccaccagggccagaatctgaaaataaatggacagctcggaatactccacggccttcttccactgcccggatttctcataggcctggatgagaaggctgcaggattgattggacatatgggaactgagccgcttaggatcattaagaggctccaatagctggatcacctcctggatctttccggtctgcagctgcaccacggcctttaaaactgccgcatcagaacaaattcccacgtccaggcagttttcctggatatgctggcacagtgcctctatcttgtccagaatctgctcctggcgttttttatccggggccagcatataatgattcagccataaccctgccatctgaataagcaaaggatagcaggaataatattccttcacataattttccgtatcctccagaaccttttcaaagggctccttggtaaaggcatgggtaaaggctgtataagccctgcggatctcctctgtggtaagctgggcctcatatcctaaaagcttgtcaatgctcagatcaaaataggaggcgattcttggcaatagcagaatatccggaaagctcagccccttctcccactttgacacagaggccttggtcactccaagaaattcagccagctcttcctgggtgatccctcttctccgccttagagccagtatattttctccgatcttcatatttctcatagttttttcctccttacttttagttattatattcgaccctggacaattcatcaatggattgaaagttgactctcccaattgaagtcaaccaacaggaaactccatcggaggctgaaaaaaagagcctgaaaatataaatatttccaaactcttcattctttctaattttcctatggaaaaatattgtgcttacagaatatgttcatccaataagacggtgaagggaccgtcattttccagagtcaccttcatctctgccccgaacacgcctttttccaccaccggaacctggagggaggcctgagataccatatattcatacagttccaaggctttatccggcgcacctgcctcaataaagctggggcggttgcctttccggcagttggcatacaaggtaaactgtgaaaccataagaagctcaccctttacatcagacagagaaaggttcgttttgccgttctcatcctcaaagatcctaagaccgatgagcttttttaaatatttatctgcaatctcctttgtatcctcccggcccacgcctacaaacaccagaagacctttgccgatctcacccacggtcctgccttctacggtaacctttgcctggtttactcgctgaatcactagcttcatttgtttttactcctgttttttaatgtttctatggtctttttcacccattttgcaaaaattctgctatatttcttgatcagtccccaaagaatcagaagatatttcttaaagatctccagaagaaatccggaggatttcttctcatagttcttgttggcagcgccctcctcttcctcatcggaacggataaagtccggattctccatctcagccaggattttctctacttcctggatattgttctccttggcagcctcctcccgctctcccggggacataaagctgtttttcttctccttcagcctggttggcttgagggtctgtacattgatggagtccatattgtaataatcttctaaatccaccggaagctccttcctgtgaagagaccgggtgataaatccccagatgagcgcatagagcacggcaaacaggggaacgcccaccaccatgcccgggattccgaacaggccgccgcccactaaaatggccacgatcaccatgaagctggacaggccggtggagcctcccagaatcttcggtcccagaatgtttccgtcaaactgctgaaggacaagaatgaaaattacaaagtaaagtgcctgcatgggatccaccagcaggatcaaaaaggtacagggcacagctcccagataaggtccgaaaaagggaatcacgttggtgacgcccacgatcacacttaccagaattccataaggggtacccagcatggaggtcccaatataacacaacacgccgataatggcagaatcaatgatcttaccattgatgaagcctccgaaggtgcggtgggtcaggcgcatggcacggatcacaccgttggccttgtgggtaggcagaagggcgcacacgatcattttactttttgccacgaaaacctctttgtctgccatgacatagatggagacaatggctccgatcaaaaagttcttcaggaaattaatgatatcaaacacgccttcggatacattcctcagcatggtctggagctgaggcagaatgttggtggtaagatacagctctgcctgggaagcgtaatcctccagggagttgatcatgttctcatccagcttgtcgctgtgcgcagccaaatccttcagccagtcctggattaccgttacatagtaaggaaagctgtagataatgttcatgatactccggatcaactgaggcaggatcatcatgatcagagcataaattaaaacaccgaaaaaaagcagggcgatgatcacgctggcatagcgcaccacccgctcccctcttcttttgagagtcttctttgcctttttacacaggggaaagaatattttcttctccagaaaattcaccaccggacttaatagataggccaggatgacaccgtacaaaatcggcgccagaattcccaggacggcttttaagcctacgatcagtgttttcatctggaaaatgccaaagtaaaacagcatactggccgcgatcaccaaaaatgctgttacaccccaacggaaatacctgttttcccaacgaaatttcatagctaccctccaaatctaaagttccattcttatatatagactgcattataacatgttttcattcgtctgtcacaaattttatatttttttctatcttttttaagaaatatccagtataataagcaagatgtaaatgaccgattcagcgcaccatcaaggaggagtttatgaaactgcagcaattactcagtgttaccagaaaagccgtggatgaattccatatgatacagccccaagataagatcgcagtgggtatatccgggggcaaggacagcctcaccctgctctatgcccttcacggcctgtcacggttttaccccaatccttttactttggaggcggtcaccgttgaccttggcttccccgggacttccatggagcccattcatgccctgtgcagggaaatggggatccattataccgtgatccccacggaaatatacaagatcatctttgaagaacgaagagagaccaatccctgttccctgtgtgcaaaaatgcgcaagggcgccctgaaccaggtggccaaggagctgggctgcaacaaggtggcctacgcccatcacaaggatgatgtggtggagaccatgctcatgtccctgatctttgaaggacgcttccataccttctcaccagtgacctactgggaccgtatggatctcactctcatccgccctcttctctttatggatgaaatggacgtcattggctttcagcacaaatatgaactgccggtggtaaagaataagtgtcccgcagacggcaacaccaaacgagaatatgccaaaaatcttctccgcaccttaaaccaggagaatcccggcaccagggagcggatgttcaccgctattcaaaacagcggtctcaaaggctggaaaacgcaggtctgagtatcggacctgcgtttttaataagcttatttcgccaaactttcaaagttctcaatggcatttacaatggtttttactgctccgtccactccaaacttgctgctgtcaatacacagcgaatatccggcggcctctccccatttcttattggtgtaataattataatagcttgcccggctcttatcagtctttacgatcatttccttggcctcgttgggtttcttatggtatttctgggaaatccggttgatcctccagtcaagatctgcatgaatgaagatactgatgcaattcttgtaatctgccagggcgtaatccgcacatcttcctaccataacacagggaccctgtcccgccagcttcttgatggcatcaaactgtgccaggaaaaccttgtggttcatgggcatctcggtaaatccactggcggaatatccaaaggaataggtatccatcaccagagaatacaaaaagctgttcgtaggcttctcatcatgattctcaaatagttctttacaaataccgctgtcgttggccgcatgctccagaagctccttgtcatagcatttgatcccaaaatacttggcaacctcctgaccgatctgacggcctccgcttccatactgccttccgatggtaataactgcatctgtcttactcataaactcaacctccattcacgcatcataattcggtaatttcattatagcgcaaaaatcgggctttgaccatacccttttggcaattctgtaataattaagagcaattatgaaaaaaaactgctattttctcaatttctctaacagtttctcaaaataatccggcaaaggggcggtaaattccatgtacaatcctgttttcgggtgaatgaagcccaacaccatggcatgaagggcctgaccttggagatgatagggatttttggaggagccgtacacctcatcccccagaagcgggtgtccgatactggacatatggacccggatctgatgggtgcgcccggtctccagggtacactccacataggtgctgttcccaaagcgctccagaacctgatagtgggtaactgcatccttgccgttcctgggattgatggccatctttttcctgtccaccggatggcgcccaatggggccttcgatggttccctgatcttccttcagattcccctggaccacagcccggtatcttcttgtgatggaatgaacctttagctgctctgccagctccctgtgggtttggtcgtccttacacaccaccagagcccctgtggtgtccttgtcaatacggtgcacaatgccagggcgggccactccattgattcctgacaggttccctttgcagtggtataaaacggcatttacaagggtttgagaggtatggcccgcacttggatggaccaccatgccctttggcttgttgaccaccaaaagaaaggaatcctcatagagaatatccaaagggatatcctctggctcaatctccggctcctggctgtccggaagcaccacacacacctgatctcctgcctgtaccttatagttggccttaacgggcttctccccaaccagaacacctccttctttcagaagcttctggaggtaggagcgggatatctcttggttttcaagggacaggtatttatcaatacggcagccctggtcttcttcttttacctgaaaaaataaatgttccatgctcagtcttccttttttctcctgtgtggtctgagaaattcgtattcttcgtccttatagcggatcatcaccagcaaaaagagaacgatgcagcctgccaccatataaatatctgccatgttgaaaatgggaaaatcaataagggaaaagtagaaaaaatccaccacaaagcctcttacaaggcggtcaatggaattccccacacctccggccaccagcacggcgcccaccagcagaaggggcagatagacggaggtttttggcattttactatatacatatacggcagccacaattaaaatgacggaaattcccaaaaagatccaggtctgatcctggaggatcccaaaggccgctccccggttctcaagatatttcagatggaagacccccggtatcaggaggatctccttaccgctttttaaatggctgtatgccagggccttggtccactggtcaagccagataagaaatagcaaaagtccccccaagcccaaatggtaacgccaggagcaggacgattcggtcttgttgtttgtcattccagaatttcctcaattccttttaaaatttcttcgtcactgacagtgcggtcaataaaggtatgaccaatcccattcatcaggacaaatttaatatggccgttttccattttcttatccttccgggtggctttcagcacctcctgggcctttaatccctgtaccttggaaggaagtccgtacaactgggtggttcttacaacctcttcatattcctgacaggtgagtagtccccggtttctggaaatgcaggccacagccacagtacccacggccacgcactggccatgaagaagggtaaaattcttcagcttctccacactgtgtccgatggtatggcccagattgagaagcgcgcgctctcccttctccttgggatcccgctccacaatttcgcttttaatggtacagcaccgaaagatcatttgggaaagcttgtccaaatccatcttcacaatggcttccttctctctctgaagccattgataaaattctctgtcgcagatcagaccggatttcagcacttcccccatgccgcaggcaaattcttggaagggaagggacttcagtgtccccagattcatatacaccagtctgggctgatggaaggctcccaccatatttttatagttcagaaaatccacaccggtcttcccaccaatgctgctgtccacctgggccagcaaggttgttggcacctggataaaatcaatcccacgcagataggttgcagcggcaaagccggtcatatctcccaccacgcctcctcccagggccaccagaaggcttttccggtccagtccctgaaggatcaggtgctcatagagcttctggatatttcccaggtgtttttcagtctccccggcggggatcacataggtggtcacataggaagcagttttttccaattccctgcgcaccgtctcctcatataagggctccacgttgctgtctgtgacgatgcagattcttcttcctgccaggccggcagcttccatggcggctgtcaggtcaccgaatccgtcccggagataaatctggtaggaaaattcattttctctttttacctggagttctctgtctgtcatatcacacataccggtacagccgcacgctgtatcttcctttctttgtttgatttaatataccctcgtaacggaaacggccttttcctctcacagagaccaaatctccctctttcagggaatatccattggaggtgaccagccgtgcgttcacaaacacgtttccactttccaccaggcctgtcatgctgctcctggatacaccgaaggcaagggcgatcatggaatccagacgcacagaggagcaggttcctgtcacctcctgaagctttggcgttggcagttcccccaaggcatctgcttttgtggtcaatacggctgtatggcgtacacggcacagattttctataaaaaagtccgccatccggtccaaacagaaaagccaggcaccttccttttccacaaggatgtctcctatggtggagcgctccacgcccaggttcagcaaagcccccagatagtccctgtgggtcaggctctcggcgaaacggatggatttttgccggatcttcagacaggtgatgggatattcccaggaatagataagagcatcaggatgaaaagccaccagctgacgctccgcactgtcatagccgccaaaggtttccatggttaccccaaattcccttaagttcagactatttaccgtatgcagttcatttagattgaggaaatccgtgaaggtgacaatgtcccgctgataggcggtatttgccagctcccggattctttttcggaaaaaaatctcatcttccataggtctgcttaatatcctgctctcacagaaggaacagagccattgagaatgttctgaagatcccctgtgatatccacgttggacggacccagaacaaaaatatagctggataccttctgaaggctgcctcccagagaatagcaggcaccggaagtgaaatcaatgatcctctgtgccagctccacatcaattccttccagatttaaaattacagttgcattttccacaagtgtatctgcgatttcgcgggtatcctccatggaagacggtttaatgacgcaaacttccatattacctccctgatttttctttggtgttctcattggtgttatcttagaagacgtgcggggtgccttaggggcggcagagcgctcgggaattctggtcactgtagcagcggccgctttcctggatttttcccgtactggttcgtccaggaagtcctcctcttcttcaaaatcatcataatctttcttcttactgaacttttcaaagaattttttcttaggcttgtcctcttcatccaattcgtcgtcatccagtaaatcgtcatcatcgaaatactcgtcgtcatcgtagtcatcatttaactttatggcctctaagaacttatctaacacagacattttaaatctccattctttattttatcttatcgtgagtagtctctggcaccaaaaatacccgttcccacgcggaccatagtggccccttcttcaatggcgacttcataatcaccggtcatacccatgctgagtacgctcatagtaacattattaatgtttttggctgcaatgtcaacacttaattttttcagagcctgaaatacaggtctgttttcctcaggattgtccacataaggagcaatggtcataagcccctgaaccttgattcccggaagctttccagcctctcgggccagtgtgatggtctcctctgtggaaatgccgaattttgtctcttcctgtgccacattcacctccagaagaacgggaactgtgactccttttttcaccgcctcctggctgatggtctcggccaggcgcagggaatccacagaatggatcatgtctaccttatccacaatatattttactttatttctctgaagatgaccgatcatgtgccagtgaatgtctccgggcagctcctcatattttgccgtgatctcctgcaccttattttcaccgaaaacccggattcccagatcataggcctcctgaagcatttttacaggctttgtcttactcactgccaccagggtgacctcctcccgccttcgaccgcttctgtcacaagctgcctgtatgcgggcttccacctccagaagattttctttcaacatataaatgcctcctttgtatcctgctaataaagaatatcctcatcctccacctgagaagcgtcctgcacaatgtggtcatagcggacaagaccatattccgtctcatcgtccacaatggcgaactcttcattttggtcaagaatctctatacagcgaaatactgcatagcctttattaatacaatagactccatccagcttgccggattttcctataatgtatttttcctttgtttccgggttgataatggcatccccttctttgaaaacctttttatcaatgtagtaattataggtctcctccccgttttcgtctgcaggggggattgtctctttcccatagatggtagtgggaacaaagatctgggcttcctttcctttggctgtttcctggcgcataaagccaatctcactgccgtcctcgctcattgtggcatattcggcaggcaccttgtaaaagtcctgggtaaccactgccgataagggaatcttcagaccgctctgcacatttgtaaccagctcaatatccaaaaagcggtcagaggcatagcggatcagccctttttcaaaagaaagcactccatattttaaactgtctttatcaataatctgaaaatcaccggtctgagtcatggaatcctttaaaaatttcactcgcacggtggtccggtctgcaagcttcactgcctgctttttcgttagagggatcacaagctgccatttttcgtctgtgataatggtataaatgtcatccccgggacttacctggtcctgtgtctttaaatccacttcctgataagaattctggtcaaaatccttagccgtaatgttgtcaacggttttatcctcataaccatcccgggaatacaaaataatgccgtctgtcaatgacttggaaactgcctggtttccaagggtgatggtatttacagaaaactgagagctgctgtccccgtcctccccctgtgccgtgtctgccggggcgttctgaacccctgcatactgaaggatattcccctccagctcatacttaaagctataggtggagttaaagttgctgggattaaaaccagaagaaaaactgctcatctgacctctgatcttagccaggtcctcagcacttaaggtggtctccccctccgggcttttggaagcactcagggcgtagacggcaccgttggcattgatcttgttgccctcccgggcatagtaagtcacataaccgccggactgggcagaaaccaccgtctcctcccggatagcaagtcctgtgtaggtttcattcctagacaagggacctgcgatcacctgataggaagtcatgtggttggatgtcaaatataaaatggcactgaacagcatgtacaaaaaaagaatgccgaacatgaccgtaccaatattcatggtaaaaattcttctcaaggatgcaaaaaaacccggcgttcttcctttggaattatttgatttctctgccaaaaataagactccttttcgtaatcgtacaatttacattttatcattatccgttacccttgacaagtaaaaatgtgcctttcaagcccagggaacgaaattcgacaagtttcaacgcctgtggcagggctgggggcacattcccggaaattccgctaaaatccccttccattcagccattcccggcatgttcttagggcccggacgaaaagaacaaggcggcagaaaactgccgccctgaatcattcgttatgtagttgtcgggttcccgtctattattaaatattataaagcaacgctgattgcttcctggaattcctgaggaacttcttctttgtccaaagacatactgatcacaaaggtaatgtcaaacttcttgctgatggattctaatttcttaagggtatcggtgatatcctggccttccagcttcgctaccgccaggaaactgtccaggtaaatctgctctaaatcgtgatcctgggaaaggatgccactgataaatcctacaaattcatcactgttgtgaatggggtaaagagatacatcaatgagacggatcttgttgtttaactcatacatatgcttagtgctcttgtctaagtaaacaatactgccgttggcagccttaatcgctccattcactctgtctaacagtacttttgttttgcctttgcctttctttcctacaatcagttcaaccatgctgttttcctccttagacacatataatattcatttttaccaaaaaccatatttaatatgtttcaattatagtgcatatcgtcaaaaaattcaatgcctaatttgtgaaaaaataaagaatttttcgtaaatgtatttacattgtattaatattttccaaaagtgctcccatctgctgataaagtgtcgttttatcgtatgcattcaacacaatagagatgtaggggttcccgtaggcgttctgggtaatgagggcaaggcagtttcctgcctcatcggtggtacccgttttacctccaaggatagtaacatttttgggaggagtggcaagtccgttgagataataatcagttgcatccagcgtaagagccatttcggttccatatgcgtctaaataggtggtggtgtaggagggcagctgggtgatgtctgtaaattcgctgtacttataggcctcctggagcatgagatagatgtcatacacagtggtataatggttttcatcctgaagcccgtgaggattggaaaaatgcgttcctgtcattccaagctgggcagcatactggttcatcatattcacaaattcggcctcggaacctgcgatatgggtggcaatagcagaggctgcgtcatttccggaatagaccaagagacagtggagaagctggtccatggtaagctggtctccggccacgaagccgcagacctgggagccttcctccaggtttacattttcaggggagatggtgaccatgtcctgcagatttccgtatttaatagccagaattcccgtcatgatttttgtgatgctggcagggtagatccggtcataaatattttgggcaaaaagtacctccctgcggttcagatccatgagggtgcctgtctgatagctctccagggctacatttcccagagggacatttccttctgtgacacacaggttcttggcaaagccgtcatagcgctgcttttctgtgttggccaccgtgctggcaaattccttctgtgcgctgtaaggccgggcatagtcagacaacaggccgcccttaagactccagaaggcaaagaccgcccctgcccccaggataaccagaacaccggccaggatcatagtgtttcgaatcttctttttctttttttcccgaagtctggtctgtcttcttcttgctgcctcccgctcccgtgctgcctgctccggtgtgagagtttctgtgcgtacttttttcacaggctggctgtttttattctctgtgctcataacagttcctctttccaattgttcttttgatgattttttaattccttctgataggcgctgctctgcagacccacattcagtaccaggccgataccgatgaaaagacttaccagggaggtgagtccatagcttacaaagggaaggggcgtacccgtgttgggcatcagacgggtggccacacagatattaataaaggactgcagggcaatgaccgtagccaccccgcagcagatgatctttcccgacagatccttggaccgcaatcccatgcggatgcattccagggtaatagccagcagcagcagaacaatggcggagcagccgataaagccatactcctctcccgccactgcaaaaataaagtctgtctggttctgggatacaaagttcccttcattcacataggttttttcttctgaactgaaacgttttcccgccagctccccggaaccgatggccatcacagagtttttctgctgctcaatgtcatcggaatactcctcattttccgggtacaggaaggacatgatacggtccctctgatagtccttgatgagcttctggtccggctgcactactatggacaggaaaatgatcatcagcggaacagcgatcaggatcgctcctcctatgatcttatagcttaacccggcaatataaattaatacacaaaatacaacagccaccgtgatggtatttttcaaatccggctgctcgtagatcaaaaacaagggcaccaccagcagggcagcggcctttgcaatggttttgaagctgtttagatcctcctcatgatccatgaaaaattttgcaaagaacaagataataataatctttgacagctccgttggctgaaagcggataaatcccagattcagccagcgtccggcgccgccggcctcatcgccgaacagacgcactgccaaaagcatcacaatattaaatgcatacatgatccagtaaaaattcaatatccaggagaaatccatcaaggatacgatgaccatgaccaccaggccgaagatcacccccgcaagctgtttattctgcagatccgacatagcatttcccaccaggacaacccccataagactgatcgccagcacgaaaataaccagccggaaattataaaatcgtagcttatattgtttcagcattcttacacctgcttttctttcttcctatgtatcggcagcattgcctgaatcaccggcggctctcccacaattcgaagagtcactgctttttcttcaatggtgacgtatttactcatgacgtgaatcaaatcattgcgcatcatatttatcatctgtggagaacagtctatccgctctgataccagaagcagtttcatcctgtctttggcgtacctgccggaggaagaagctttccttttcctcaggaaccctatcatagaatgcctccccatctgaacgattattttttgaaaatggatttcagccgcttaaacattcctttttttacccggatttccgtgaaggggatctcctcccccagaaggcggcggcagatattccggtactcctcttctgccggggaatgcttgccggacagaggatctccctgattggtggctatgacgatctgctcgtcatctaagatggtgccgatcaggttcactgccagaatgtcaatgacatcctccacggacatcatgtctcctctggagatcatgtccggacgcagccggtttaccacaagatagatatccttgatgttctctgcctccagaagaccgatgatccggtctgcgtcacggatggcggaaacttcaggggttgtcaccacaagggccttgtccgctcctgcgatggcgtttttaaatccctgctcaattcctgccggacagtccagcagaatatagtcaaattcctcccgcagatcctcacacagcttcaccatctgctggggagtcaccgcggatttatccttcgtctgggctgaagggagcagatgaaggccgggtacccgtttatccttgatcaatgcctgcttcagcctgcagttgccgtttaccacatccaccaggttgtacacaatccggttttccagtcccagaaccacatccagattccgaaggccgatgtctgtgtccaccacaaccaccttttttccaagctgggccagccctgtgccaatgttggcaacggttgtggtctttcccactccgccttttccggatgtgatcacaatgacttcactcatattctttcctcctaaacaaatctcctctttgctgtttctcttcttctgttttgtttagtcgcgtcgtgtaacttcactggtttcggatgaagcataaccggtgataatggactttttatctgtaagattgaataaatatttaaaaatatcatccgcaatgtaagttgtgttggcagaagaatatccattggccacgcgcactgctatggcatactgcggctcttccgccggggcatagccgattataagggcatggtccggccagtcctcacgttcctgggcggtaccggtcttgccgccggcgctgatccccaggctggagaaggtggcattggtggagatcacacgctccatgccgttgtgaatctgatcccagtaggtctggtccagatccacgcgggagactgctacaggactatattcttccactacttttccggccgggtcagtgaccttgtccagaagagtgagcttgtaggccgttccggaatttgccagaagggccgcatacctggcaagctgggtggtggtgtacaggttggtaccctgtcccatataggcagcaacaccctgctggtcagcaaccttgggggaagattctacaatctcaatcccggtcttctggtccagagccatggtggcagctgtggactggagtctggaaaggccctgggactctgagtattttccatcctcccccttaccaagctcaaagccgatcatattaaagtaggtgttgcaggactgctcaatggcagagctaagatccagggccccgcatccaaaagtattccagcaggaaatggggggctcgatcagatcaaagcttccattacaggtaaccaccgtaccgggatccagaaagccccactgcacacctgcaatggtggaggccagcttaaaggtggaacctggggctgtcctctgctgtgtggctttgttaaagaaggggctggacagatcagtggccagctttgcataatattccacatccatattgttgctcagacggttgttgtcataaccaggatatgacacacaggccaaggtttcccctgtatttgggtccaccaccactgctgaggcagaacagggatttaaggccagcatggccggctcgatctccagggtatagatcttggtgatcataaaatcataggcagtcatagtgcctgaggaaagagcctcatagtggctgtcttccttgtccaggacaccctggtcatagagaaccagacaaacctgctgaccggaaatcctgtcctcctggagcatatatttatacagcagcttgctgaatccggtgtctgtcttcagatagtcgatcatatagctggtaagcgcctgatagacctccgcagaatccagatattctccctcaggtgcgatcttggatatatcgatccagttctggctggctgcataggtgagatattccttcaggctgatggtgccttcctcctcccaggccttgtaggtgggatcggacacatcgatcatatccagggacaggatccccagcttggtggtgagaaggttattggacaaatattccagatattctctcatctgatcatcatgctgcttgtaggtttttggattgtcactggtcagctcattggttattgtatcaaaaatttcctgctgtttttgttgaaatttggcatacaaagatttttctgtttcagaagcatcttcctgggaaaaatgctcgatatcgatcacattgttgttgatgagctggaaataacagtcgtacacgggaacccggatctgcatggtatccgcgccctcgggaagctcaaaggtttttacatcgtcaatgtggctgataaggattcccgctactctctgcttcaagatctcataaatatcctccatccagtctctcttgatggtgagatacacatcatccccggcaacgggctccaccctggtatcctcgtcaattttcagcacctttcccatgttgtcaacggacacggtctcctggccgtcctgaccatgaagggtagtctccatatactgttcgatcccggcctttccaatgaccgcattggtgctgtaggagggatccttttccataagctcctccagctcctcagaagaagcctggcctgtatagcccagaatgggccccagactctcatggtcctcatatacacggatggaatcctccaccacttcaataccctggaaacggcttttattttccataatagccgccacggtctcttcacttacatccgtggcaatggtcacagccaaatatttctggaaacgattgtttgacaattcgtagcggatcatggccatatccagcatttcctgtctggtaagctcctggggcagatggttgtccgccagctcctggggcgtataggcgctgtctccggtgagcacgatggaaaaacgctcttccgaacacagatcctccatgatctcatccgcagttgcggatgcttcctcttctgtcaggtcatcgatgagggcatggccgtaaatgtctgcccggaatctgttcagggtaaaaccctcttccacgtcaaacacaaactcattgttctcatctagctttatatgaaagttgctgtatacagaatctccgttctgctccataatcttcagcacctggtagatcgttccgttgagggccaggtttttggaccggtcatcctcataggagccgttgtcctccagagtgatggaataggccagcttgttggaggccagaagatttccgtctctgtcaaagatgtttcccctggtgcttttcagggtacgcactttggtggtccttgactggaagctgctgatataattttcaccctggataatctgcagcttaaacagccggttgatcaatacgccggccattaaaataaatactgccatcagcagggtggtcctcttgattctgatcttttttaaaacattctttattttagtacccaaattgactcactttctctccttgatgattgctgcatataccggctgttgattttataatagatccggtacacaattacggttaccaaaacggtatataacatctcagggatcataatccgcttcacataagcaaaaaggcccaatcttcctcttaaaaggaactgcagggcataaatggcaaaattatagagaaggtccgctcctgcggccagaagcatgggaaccttcatatcatcatcataacacactttgttgctatatccgctgatatagcccacatacatatagatcaaagcatagaacccgaacagagagccatagaaaatatccaccaggacaccggtgaaaaatcccacgaacattccgctcttctgtccccgcatgaggcccatggagatgcacaggatcaccagcaggttcggcttaatggagcctatggaaacaacctggcataaggtgcactggaccaggaaggtggcaatgatggtaacgaaaagtatgatcttactcttcatcggcagcctcctccccctgctgggacacttgttcagcttttgacatggtaatcacaaagacatttttcaaatgccggaagtccacagggctgacaatggttcccttttttgtcaggttgttggaatcctgctccacctggcttacataaccgataaacagaccctgtacatactggggactgatgtgagaggtaacaatacgctcccccacggtaaccttgtcctcttcgtcataaagctggctgaagcggagctgtccgctgtcaatgagctccaggtccccggtgacaatgcaggcatcggaggtgctcactgtctctgcactcacgttgctgctgtcgtcaatgatgctgcgcaccgtagcccaattgggccccacctctgtgacaatgcccaccagaccctttccggcaatgacgttgtggtctaccaaaatgccatcgttagaaccccggttgatcataaatgtgctgtaccagtttcccgggtccttggagatcacctgtgcggccaccttgggataatccgaatagtcctcatccagctggtatagctccttgagctgagtgagttcagtctgtccctgaaggagcagattgttctcagaagtgagcacatcaatgcgctcctgaagcttctggttctcatccaatagggcgtccttctcttgaaaagtgctccaaacatccgtcagccagatccccacctggttgatacttttttcaaagggcactatgagcataccggccacattgcgcaccggctctatggaaatgcctgaggcaaaggttgccacgatcatactcacgcagagcatggtcataatggccagcacatgcttattttttaattttatgcggaaacgcagccgcttgaaaaatctcttcatctgttacaactcttttctttacagtgttctctgcttgatgggggctgcccatttctgcagctcccggtcgcggatgatcttctccaggccgctgaccgtggcagtttcatataaatccgacaatttaaagctgtatccggtgaccattgccagataatgatccaggaagggcagacgggtgctccctcctgtgagataaattccttctccggcaatatgcccggtaacctggggcggcgtgcgctccaaaaaagttttcatttcctgggcgatctcatccacacagttgcggatgccatcgctcaccacataggaagagatgatctcttccctgggaagtcccgagaggctgtcaattcccaccaccttgcgggcttcttttttttctgtattcaatcttcccatgacggtcttcagacgtttggcagtcctggtgccgatgtgaagattgtaccgtttccggatctctgcgcagatagactcattcatctgtctgcctcccatgggaatggtcttgctgataatgatcttgccctcagcaatgatggacatctgggtagtctgggctcccacatttaccagcatgcttcccacattgttctggagattcatattcatagccagagcgtccgcaatgggagactctaccatatagaccttattgttcttgagaaaatgcccgttagccaaggaataataggcccgcttctccactgccgtaatgtccaggggcaccgaaaaatacatagcggagccgaaccccagggttttatcaatgcgcttgagcatggaatacagctgtatctccagaagctccttatttgctatcatgccaaaagccatcggcgattccacatggatgttttccggtgctttctctaacatctcatatgcttcattgcccacggctagaattttccggcccttataagccaccatatttttttccagataggttttatttttcatcagggagtagacctttaccgtactgctccccagatcaactccatatatgttgcgaaaaaacatattttactgcccctttatggttttcatcccaaatattttgcctcgcgcatgcttacatattgatggtccccaatcacaatatggtctaaaagatgaatccccaataactcccccacccgttgaatccgtccggtcacttccagatctgccctgctgggcgctgggtccccgcttggatggttatgtaccaggatcacattcacagcatgatatttcagggcctccaaaaataattccctgggagataccacagattcatttacggtgcccttgcttatgagaacctctcccagcaaatgattcttcgtatccagcatcatgcagatcaaatgctcctgctcttcatggcggagctgctccatatagtattcagcaatggtgcagggctccctgaaggacagcccctcaaaggcctggatctgcgccatgcgctttgccagctctccgatgcatttcatctggatcgccttgacctctcccactcctttaatacccttcagctcctcaatggataaatgatggagtcccaaaagtccggtgtaatgttcatcggccagcttcaggacttcattggccaccagaagagaatttctcccttttcctcctgtgcgcaggatcactgccagcagctctgcgtcgcttaaggcctgtgtgcctctggcaagacacttctcatagggcctctcctccttgggcaattctttcatacttaacatctgcactgctccttcctgctctcttcaggaaattaacagaacagccccgtccttctaaaaaatgaccaggttaaaatgcagcttatattctaacataaaaaaggagagatgtacacctctcctcaggattttctatattttttagagattgcctctgccgccttgatcccgtccatggccgcggaggtaatgccccctgcataaccggcgccctccccgcagggatagactccacccagactgctctccagggcttccctgtcccggaccagtcttacaggagaagaggtcctgctctccacgccgcttaaaagggcatcctctctgtcaaagcccggtatctttttcccaaaggcacagattccctcctggatggcttctgccgcaaaatctggcaggatctctcttaagtcagcgaaggcataagctcccttcatggagggagtgacctgcccaaaggccgtgctcaccttgtgggcacagaaatccttgaaaagctgaacagggattctgccttgtgccgctgcccaggctttttcctccagctctctttgaaaagcgattccggccaggggcccttctcccggataatccgacggattcacggtaacgatcagggcgctgttggcattcttcccgtctctggcctgatagctcattccgttgatggccaaacggccctcctccgaggaggcattcaccacgtaacctcccggacacatacagaagctgtataccccccggccattttgacactggtgggtgaccttgtagctggctgcccccagaaggggattttcctcctcaccgtacagcccctggttgatcagggtctggggatgctcaatgcgcaggcccacagcaaaggacttgggctccatgtacatgcctcgtctttccagcatttcaaaggtatcccgggcactgtggccgatggccagaacagctgcctgggctgggatgatctcactgccgttgatctctagagctttgagacaaccgttttccaggaccagatccgtcacctgggtatcgaaccggaagcttcctcccatctgttcaatctgggtccggagcgtttccacaattcctatgagcacatcggttcccagatgaggcttctgttcataaagaatttcttcagggcctccagcctccacgaaacgcctgagcacctcccggctgcgtccaaaggggtcctttaccagggtgttcagctttccgtcagaaaaggttcccgcaccgccctcaccgaactgtacattggaagctggattcaggactccccccttccagaaggcttctacctgctcctttctctttcgtgccatggctccccgctccagcaccaggggacgaaagcctgcccgggccagataccaggcacagaaaagacccgccggcccgcttcccaccaccaccggaggatgggccagcggcaactgtccgccttctggaaatacatagggtttttctctgattaacataacattattatcgtgaaccttttttacaatctgctcttcccggccaatgtgtacatccacggtatacacatacttcttgtcctccttgtgacggcagtccagagaacggcggatgatctcataggaagcttgcccctgtgcgtctgcccttacgggaagctcctgccccttcagtcttagaagcttctggatttttttctgaagctcctcctggctgtgtgttataggcagctttaactgactgatccgtatcatagctcctcctttgcgcaggcattacccgctgccatggcgctggaccatgcccattgaagattgtaccctccgcaggtgccgtctatatccagaatctctcctgcaaaatacaggccgggcaccaggagcgattccatggttttgggattcacttccctggtatccacacctccctggcacacctgtgcatgctccatggaaagagagcctgtcacctccagtggaaagccatagatggcagaaaccaaatccggctgctgtgtgagaacagcaatgagcttctctggaaaaagccccaccagcatttccttttcggatttataaggacaggtcttcctgcggctgtccagaaagcccgccagctcttccttggaaaattccggcagaaaattcaaaagaacggtcacaggggtatgttcgtcaagggcacgcaccgcataccggctgatctggtacaccgggatacctgagatcccatattccgtgagctgcagctcccccttttctgtgatcataggcatattgtccagacacaaggtcaccgcaccttccgtgcgcactcctgcccacctggagatgcccctgcctttgcagcgaagagccaccagagcaggcagaggttttatgattttatgtcccagccctctggccagatggtagccggagccgtccgcccctgcaatggaggaagccccggagccagctgccaggatgactttggcggcaggatagctccaggtatgggtgaccacctggaagccggagccgtcccggcggatctcttttacgtgttccttggttttgatctttaccctgtggttttctgcctccatgagaaggacctccgtgacagaggaggcctgctcgctgtggggatacagatagccgtttttatttttggtgtaaattcccagctgggagaaaaaccggatggtgtcaaggacaccataggccttcagggcgggttgtgcgaattctgggtgggtcccccggtatgcctgttgatactggctggtatttgtaaggttgcatttcccattcccggtggcgcaaagctttcttcccgccctgtcattgtgctccagaaccgttacctttgccccctgtctggcggcacatatggcggcggtcaaacccgccgccccggcgccgatcactacgatttcaccattttccataatattctccttattggggaagtctggccaggcctgcatccatcagcttctgaagagacttcaggattccaagcttggcgtgctcccaggttaagcctccctgaaaatagactgcatagggctccttcatgggtccgtctgcggacagctcaatggaagatccctggacaaaggctccggccgccatgatcacctggctgtcatacccaggcatgtcccagggctccgggtccacatagctgtccacaggagccgccccctgaatccccttgcagaaggccaccacaccctccggggttccaagggtgactgcctggataatgtcctggcgctcctccctgctgtccgggatcaccggaaagcccagccgttcatatacgtttgcagcaaaaatggctcccttcaacgctccctttgtcaccatgggagccaggaaaaagccctgaaagaaggaacggttcacccctaaggttgcccccacctccattcccagtcccggggaggtcatccggtaggaagcattttccacatacttcttttttcctgcaatgtagccgccgatgggggcaaggccgccgccgggatttttgatgagagaacctaccaccaggtcggctcccacatccgagggttcaatggtgtccacgaattccccgtagcagttatccaccatgcagatcacatccggcttgacggattttacaaagtcgatcaattccccgatctgctttacagagaaggaaggcctggtgagatagcccttggaccgctgaatggtcaccagctttgtattcttatgaatggctttttttatgttttcataatcaaaggtgccgtcctttaaaagttccacctgagaataggtcaccccatactcagccaaagagccgttggagggccggatgccgatcacctcctctaaagtgtcatagggtttgcccactggggagagcagctcgtctcctggtcttagattgccgaacagggcaatggccagggcgtgggttccgcaggtgatctgagggcgcaccagggccgcctctgtgtgaaaggtgtctgcatacacccgttccagggtttctctgccaaaatcattgtagccgtaccctgtggtggagcccatacactcctcgctcaccttatttttctgcatggccaggagcaccttcatttgattatactctgcccttttgtcaatttcctcaaagcgttcctttaaccctttttcaatttccctgccaaattcataaacctgggaggaaatcccaagctgttcatacatttcctttatcaatggtatctgcctcttctcttccttatatttcttatcataccaagggttacccctggaatggccggtcaggactgctgtatatccgcttcagggaggagccccttctccttgcagatcttcaacatggcatctaatatcctggcgttgtcataatcatagtcttccttctggatccaatgtacctgggactctcttcggaaccaggtaagctgacgctttgcaaaatgtctggtgtctcttttcagaatccgcacagcctcctccaggggatattctccctccagataggccagcagctccttatagcccaggccctgcatggacaccatgtccctggtacagcccagttcctttaatttctgtacttcctgaagaagtcctttttccatcattttatctacccgggcatcaatgcgggcatagagcagctccctgggagcattcagtacaaaataggccagattatagggagattccttctggcgctcctgctcattgtgggcagagatgggggttttgttctcctggtaaaattccagtgcccggatcacccgttttatattgttggcatggatctcccgggcacttacgggatccacctggcggagcatttcatgaagatactccggtcccttttccctggccagctgttccagggaggtgcggcagctgctgtcctgagccgcctgggtaaagtcaatatctctggtgacggcctggatgtaaaagcctgtgcccccaactaaaatgggaatctttcccttggaatagatttcagccatggcagccttggccatttcctgaaaacgcacaatatgaaattcctcctggggcagaagcacatccaccagatagtgggggatcccctgcatttcctcaggctgaatcttggctgagccgatatccatataccggtacacctgcatagaatctgcactgatgatctctcctcccactgccttggcaagggagatggacagctcagtctttcccactgccgtgggaccggtaagtacgatcaaaggctgtttcataacctctcctttattttacacaatccgcttaaattttttctccagctcttcttttgtcatggagatgatggtgggccttccatggggacaatgataaggattgtccagagtgagcagttcatcgatgagcttgtctgcctcctgggcggacatggagtgatttcccttcaccgctgccttgcaggccatggcagccagccgccctgtgaaaatatccaggttctgtttctcctccctggttcccagtgcatccagcatatccaagaacaactcctcactggtatgtcccaaaagctcagcgggtactgcagaaaccgcatattcccgccctccaaagggttcaatctcaaaaccaaattccttgaaatactccatgttggcctgtaagattccctcctcctgaaggctcagggtaatgatcatggggggacttacatactgtgaagtaatctccctggaacaaaactgctttaacaaccgctcataatacaccttttcatgggctgcatgctggtcgataatataaaacttttcttcatactccacaagccagtaggtatcaaaaagctgtccaatgagacggtgcctggacctggcgctggaggacagcagccggtcgtcaaacagctccagctgctgtgtgcggtgtgcctccagccctttttctgtattggatttctcgatcacggcggtctttttcacgtcttgcgtttctgaatctacatgaagttcctgcagattttcttgaactgtatgagacttttgagaagctgcactgctgcaaatgctttttgcttccatttggttctcaggtgttgtaatttccgccgctgcccgctcctgggcttccttcaaggttccctggaaaaatccctcctcttcctttgtaaaagcgggctgttggctcacagtcatgtccggggcagtcccggcctgtgtgccataaccggctccagcgattacggaggatgccttcctatcataggagccgccttcccggatccggtttttctcaaaaggctccggcaccgctccccgctttatgacaggtcccccactcgttcgatccccgtcaggtcccagagtcacttcaggtatcatctctttatgattcaaggcgttccagatggcatggtaaatggcatcatacacctccggccctctggaaaaccgcacttccattttggagggatgcacattcacgtccagatcgtttccttccatttccagctgaagggacacaaaggggaacttatgctgcataagaaatcccttataaccatcctcaatggcctttgtgataattttgtccttcacataccgtccattgatataataattctcgaaataccggtttcccctggagatactgggttttccaatatacccttccagcttcatgaaatcattttcaaacttcacctccagcagctcccttgcgatctcccttccataaatactgtagatcacatccttagggttataattcccggaggtatgcagcttcacctgtccgttttgaatatacttaaaggaaatctccgcatgggacagggcaagctgctccatgagattgctcacatacccggcctcagtcaccggggttttcaggaatttattcctggcgggtacattataaaacaaattatggaccaaaaaagtagttccatccggggcaccgatctcctccagagatttctccacgcccccctggatcacatagcgcacaccacacatggccgtatgggtcttggtgatcagctccacctgagagacagccgcaatactggataaagcctccccccggaatcccagggatgcaatttgctccagatcctccaccttctcgatcttactggtggcatggcgcataaaggccactggaacctcctccctggaaattccggccccgttgtctgtaacacggatcagggagcggcccccttctttgatttccacagtgacagccgtggcccctgcgtcaatggcattttccacaagctccttcaccacagaagaggggcgctccaccacttcccctgcagcgatcttatcaatggtattcttgtccagcactgctatttttctcaattttctcaccaccggttcttaattttattctgcagcttaaataaaatattcagagcttccatgggcgtcaggttactcacgtccagctctcgtatctcttcaataatatcattgtcctgaacagtgtcaaaaagggacatctgttccatatccacctcgtcaaaggtaatcttctttttctttgcattttgactggtgagatccttcacagcggcagtgatatctgcgtcactgagctgttccaccagttccttggcccggctgatcacggaatccggaacaccggcaagcttggcaacctggattccgtagcttttatctgccccgccttttacaatcttccgcagaaatacaatatcgtcgcctttttcttttacagcaatgcagtaattgttcacacccgggatttttccctccagctctgtgagctcatggtagtgggtggcgaacagagtcttggccccgcacagctttgtgctgctgatatgttcaatcactgcccaggctatggacagaccgtcaaaggtactggtgccccgcccgatctcatccaggatcagcaggcttttggaggtggcatttctcaaaatattggccacctctgtcatctccaccatgaaggtactctggccgctggccaggtcatcggaagctcccacacgggtaaaaatcctgtctacaataccaatggacgctttttctgcaggcacaaagcttccaatctgagccataagcacgatcaaggctgtctggcgcatataggtggacttcccggccatgttgggaccagtgatcaccgatacccgtttttttgtaccatccaaaaaggtgtcattggcaatgaacatatcattttcaatcatctgctccaccaccggatggcggccgttcttaatatcaatggtgcctgtgtttgtcaccttgggcttcacataattgtttttctcggcaaccagggccagagaagccagtacatccagggttgccacagccttggcagtcttctggatccgaaggacctccttgcccacagtatcccgcacaaagcagaaaatctcatattccaaggcagacagcttatcctccgcacccaggatcatctcttctaactccttcagctcctgggtaatgtagcgctctgcatttgccagggtctgcttgcggatgtaattgtccgggatctggttcttgaaggtgttggtcacctccagagaataaccgaacacccggttaaacttaatttttaaggatttgatccctgtacgctcacgttccttggcctccagctctgacagccactttttcccatccgtgcgggaacggcggtactggtccacatgctcatcgtaaccttcacggacaatccctccgtccttcatggcaaggggcggatcgtccacaatggctttgcggatcaaggccgtcacatcctccagcgtatccagctgctcatggatttctttcatcaggggcgtctgaaaatctgccaggagctgctttatataaggaagcatttccaacgaagaggcaaaagcgatcaaatccctgggattggcagtctgatagctgatgcggctcacaagacgctccaggtcatacactgggtttaaatattcccggatctcatcccggaacatggcctggttctttaattcctccagggcatccagccgcttctggatgctgtcggtgtcgatcaggggctgctccacatagcttctcagcattctggcccccatggctgtctttgttttatctagaacccacagcagggaacccctcttctgcttctcccgaagagtctctaccagctccagattccgtctgctggagctgtcgatgagcataaatttctctgcagagtaaggccgtatggaggacatatgggaaagattatttttctgagtctctgccagatatttgaaaagagccccggccgcaatgatgccgctgtcataatccttgatccccagcccctccagcgtgctcacatgaaaatgctccttcaaagcagtccggcaggattcatcctcaaaataccaggcatctaaaggaaaaatgcaaattttcagccggttcttcagatcatcaatatccagtccgctcatgagaaacgcatcgttgcagataatctctgcaggagagaatttattgatctcatccagcattttctgaggtttgtctacctctgtgagaaaacagtctcctgtgctgatatctgcaatggagcagccgaaatgatcctccagggagacgattgacataagataattatttttaccctcatccagagccccattgtccagggtggtaccaggagtgactacccgcaccacttctctttttaccagccccttggccttcttgggatcttccacctgctcacagatggccaccttgtgccctctttcaatgagccggttaatataggtctctgctgcatggtagggaatgccgcacatgggtgcccgctcctccaggccgcagtccttacctgtcagggtgatctccagctcctttgtcaccgtcagggcatcctcaaaaaacatctcatagaaatcccccagacggtaaaaaaggatacagtccttatattcttccttcttctttatgtattcctgcatcattggtgataaagccatatttttaaactccttgcatcttctgcgtttgcgccatccctgcacaagggagcggcaagtttttacggatatttgtctctgatttttccatgccctgcctatccgcttttccggacaaagggcacaatccatcgaaataatatcatgtttttaaaaaagtttcaacttttttgctcatataaaacaaagctgccaatgtgcagctgcaaagcagcttccctatgcaataaaagatgctgccacacttagaattctaagtatgacagcatcttcaaggatgtcaatggaatattcggtttactgaatggcctcctttgccacctccacgtaggtgagaagctgatcagcccgtgctcctgagtaggataccgattcaattcctgccaggtctgcgaactggttggagctcatgacgatattcaggatattgatcacgctcttctgcagatcgcctaaggtaagggtgttttcatccggatctccgaaaatatctgtggtggttggttcctggtttcctgtgcttacattatctaaagcagataatttttccagcttgtaggtgatcgtaacttttccgtcactctcaacataacttgctgtgccgctgtcaaccattccgtccagatgtgtatcgcctatgtctttgccgtccagcagttcacggatggtccattcctggatttcctgagaggtggtaatgcctgcctgctgagaatcatagtagttgccttcttcgtccacatacagacgcaccggacgtgtttccttatcaaatgcttctttggttgtcaccacgtcgtagtttcttccgctctgggcacttggacgataatctccccaatgggtcacggttgtataagtgacagttgttccgcttgcacgggttgttttggatacatagggatagcctccgtcaacggcaatgccgttctcatccttctcaatggccggggcagcatcggtaatatatccagtgatattggaaacggtcttgcctgcacagatcaggtcatttcctgcatgcatggcccgggcgtctgaataaccgcctgagccgccccagtccgtcataaccagaccatcgaagccccactccttgcgcaggatgttttcaagcagctcataatcatttgctgcaggtacattgttgatctcattgtaagaggacatgatcgccataggtttgctgctcttaacggcaatttcaaagcctttcagataaatttcacgaagggcacgctcagacataacactgttgcttccacttcgggaggtttcctggctgtttgctgcaaagtgcttataagtcacaccaactcccggaatatcctggacaccagaaccttctgcgcctgccatcattccggtaagcagcggatcttcagaataatattcaaagttacgtccgcacagaggattgcggtgaatattcatgcctggagccagccataaggtaacacctgctgccagcatgtctgcgccaatggcagagcccatctcataagccacactggtgtcccagctctgtgcgatcatggcacctactggataagcagtacagtattgataataggtggtcccgtcttcttcgtagctctgggtcacacgaagtcctgcagggccgtcagcatttgtggtattggggatcatacggtcttcaatatacagaccacaggtctcccctgcctcaccccgaacccacaggttgtcaattgcctgaatggcagactcagagagcttctttgtacttggggaggttccgcctgcggactgtccgtctgcattgggggatttgttgccgccctccaccatattggccagctcttcaatggtcattccagaaacaaactgctccatggtcagttctccgttatatacgtccagaagggtgtaatactgggcggtgccgtcttcttcacttccgctctttacacggtagttggccatctgttctggcttggtatccacggcatttccttctccatcgtaatatacaggattcacattgtaatcaatattggtctcatagttatagccatttacatttacatcttctgtagtggcagagatataggtatttacatcctcataagtctgatcttgggtaagctggggatatacattctctgtattggcaatggatgctcctgaaagagacagagccgctgcaccctccgttgtttttccgtcattaaattctgaaccggaagcgccggcttctttgaatgcctccacaagcttattgtaattttccaaacttgtttctttgtcaatggcaatcttgctgttgtacggaggtgtgccccgtccgccggaactgttgtcagagccgcccacatttgcgccgtcacggtcaatggccatctggttggtgagctgctgtgtgatcaccgtttcgtccaggctgatcacagcagccggtgtggtattgcgggagctgttgcccacacggatgatataatctccggcttccataatataagcagccttttcctcatcataggaggacatttccgtggtattaaagctaagtgtgagagtctgagattctccaggggccagattatcggtttttccgaaagcggccagctcctgatagggcttatcaagggcaccgtcgggagcagagaaataaacctccaccacttcttttccggaataggtatctccagtgttggtaacagtagctttcacagttaccttattttcatccacggtcacattgtcagtgacaatatcaaaggtggtgtaggagaggccataaccaaattcataatttaccttttccggtgcaaaggtgtcaaaatagcggtagcccacataaatgtcttccatgtagtattcaatataagaggcccaggggtcttcttcattgatctctgcaaaattttctgtggaaggatagtcggtaatatccgatgcccaagtgtcaaccagttttccggaaggagtcacggttccgttgagcacctgaaccagagcgtcaccgctgagcatacctggattggacataaggaccagtgcatcggctccggattcctggaaccagctggaatcaacgctgatcacattaagtacaacgatacatttgtcaaatactgagctcaaaagctgaatattggcttgttcgatatcactgagatagtaatctccctttgtgggagtacggtctgcaccctcgccggcatttctgcgtactacgtaaatggctgtgtcagtcttctgggccgtctctgcaacatcggcatacttaagcatccagtcctcagccagtgttccccgtcccataccgtcaactgcaaaggagttttcctcattatacgcctgaaggtaatcctctgtgagaacgttgtagccttcatttttaaagccgtccagcacggaagatgcgatggcaacaccgtcaaccgctctgccgtccgggtagacaatacggttatttaccgcaccggaacctgttccgccttttactgtctgtacagctcctgcaccgtacagggccacatcccctgcactggcaataggcagtgccgcattcttattttccaaaagtaccatgccctctgtggcaagctgcaaagaaatatttgcactgtcgatttcatgctgggttacctctgttgaggtgacagcccctggtcctgctgccagcacgctgctgccggttgtaaggatcatggttccggataataccgcggccatgacctttctgcctctttgttttttcatacgatcttcctctcctttcttgaagaacagatggtggattcttatctgttcttgatcacacaattactataacaggaaggccgtttcagggaaattctccattcttgcaccctcttgcagtattttgacaaaccccttgcaaaattttgccatattccattatcttgccttttccctgtgttcaggaggccgaataatagcattttttctatctgatcttggacctctcattcctaatataatggacaagctcttgttcataggcttctgtgtaagaaactgcgtgcacatcttcaaacaggtctgcaaactggttggactgcatgaccactttcaaaagattgatcacactcttttgcagatcccccagggagatattgttcttcttataatatccggtgtagatgatcgttgtcatgccttcctcgtcctccgacactgctgcggcgcctccaagctctgtgagcaagtctgatacctttacagtgaccgggtttttatccttatcggccatcacccgcacagcctcacgcagttctgccgtggggactttcttaatgatctgggtatctccctgtacgtctggcacaaattccccccactgtgtcttggcgcttattcctgaccagcttttatccgtgagcactgccgggtaggcgccttcctctccaaatgtgggctcctggtcacaaaagccccggatggtgatatcctccacagagctgccgggcatgatcagatcatttccagcatgcatagagatagagggcgtggactgtccgccgccccagtctgtcatgatcatcccgtcaaatccccattcgccccggggaatatctgtaagaaggtcataatcgtctgctgccggtatgccattgtttaaattataggaggacataaggcacatgggtctggccccctttaccactatctcaaaagctttcagatagatctcccggaacgttctttcgcttatggtattgtttacggcctttcggtttgcctcctggttgtttgcggcaaaatgcttgatgcacaccccgataccttcattggactgtaccccaagagtttcagcgatccctatggttcctgccagaaacggatcctccgaataatattcaaaattacggccgcaaagtgcgtttctgtggatattcattccgggagccagaatgatcgttcctccatattccttcaattcccctccgaatgcctttcccacttcttctacgatctgaggatcccaggtctgtgccagcagcgtaccgatgggccacgcagtacaaaactggtaatattcatgaccgtcctccccctcatactctctggtgatgcgtacccctgcaggtccgtcaatgagtacaatattgggaatctttttcgactcaatatagattccggctgtctctccggccgccccctggacagaataggcttgggcgcttttgatggcactttcgcttgtagtctttgtattttccgaggaagcccctgcagactgtcctgacgcattgggcagcttatttcccccgatcacaagatctgccatctcctggacagtgagaccggacacaaactcctccattgttatgatcccatcatacacatccttcagggtgcagccactgaaatccccctccagctccactacctcctccctgtaaggaccatgatacttgttgtttaggggatagttcaaattttgggccagatactcggtctgtgtggtttcagacacataggcagtgactgtttcctcatcatagctggaggcgttgtctaccgttgtaaattccctggccatcagggacaggcgctgtgccgatgcgatctcctgtgcctcccccttgtaggcaaagggctggatctgagccttggaaagctctgtgatctttttatccgccccaagctgattgctcagctgctccgtcaccacggtttcatccagcgtgatcacagctgccgcctgggtgtttctggaactgtttcccacgcgcaccacgtactctcccgcctccataatgtatgccgcccgctcctgggagtaagaggacatttccttcgtatcccacaccagcttcagctcctgactctcccccggcgccagctcctgggtcttttcataggccgccagctcctgatagggtttttccagctcgccgtcaggtgaggagaaatatacctggaccacttccctgccggaataggtatctcctgtattttttacaacagccctcacagtgacctccttagggtctgcggttacctctataatatcaatttcaaattctgtgtaagaacctccatagccaaattcataagccggatttaccccaaaggtatcaaaataccggtatcccacataaatgccttccgtataatcctcctggtccgtattgttgtcattgagactaaagctatctgcagatggataatccgcatactccttgggccaggtatctgtcagctttcccgaagggatcacctctcccctgagaattctggtcagtgcggtgccgccctccatacctgcctgggacatgagcagcagcccatccagacctttgattttctgaaaaaagcttgtgtccatgacaccgcttacattaagtataacaataaccttatcaaaggcagctcccacctttttcagattctttttttccgtgtccgtcaggtaataatcccctggttctgccttacggtcctccccctctccggaattccgggcaatcacatacaacgccgtatccgttccattggaaagcgccctctggatatcctcatcctttacctccatatctggaaagctgaagtggtcaaaccatccgccggcaaactcagtctctgccttgtgataagcctctgcataggcattcagccaatccccactggtcacatggtaccctgctttttttaacccgtcccagacagatacggtataccgctggttcacatctccggatccggttccgcctttgactgttttcactgccccagctccaaagagggcaatgctgcctgaggaagggatgggcaggacattgtttttgttttcaagcaaaaccatcccctgttctgccgcttccatagaaagggcggcatttgtgatctccctctgggtgagctcgtcagatacagccggcccgcccatggctgtctgcgcacctgcgccccaaagcaggactgctgccaaggcggcgattttactgttccagtttcttgtgcgattcttcatttttaagcttccccctgctttttttgatggcgcattttttattccatgtattcccgcatttcaccgatgctcattcctgtatattttttgaaaaccttatagaaataagtgatatttccgtatccggactgctcggcgatctcctttactgtataagtaccctgccacagcagctttaaggcttttgtcatacggatttctgtgaggatctccacaaaggtctggtgcagctcctgctttaatagacggctgagatagaaggaactgatcccagatgccccggcggtctgctccagagaaatatcctccatgaagtgctgctccatgtaaagtaccgtgcgctcaatatattccgtacttttctttgccctggagtcccccttgggatccagccgccggatactgtcaagcatccattgctccagagacggcttatctgcacacagcataagagccccccagtccacacggctcccttttgcataccgcagagcatatccacggtcctcaaggatcctctcactgaacggaaacattgcctccagtaccaccatacgtgcagagggaagctccagctcttttatttccggcctttcaaaaaaagtatgtacttcccgctggcacttttccatctgaccaagcttcagccatttggtacatttttcagccaggtccgtggggatttccggtttcttctttttatctctggctttataaaaagaaacgcccggttttcccagacttctggcggcaatccggctctccgtcaggcctgcggtcatgctttccggctccacctgccagctgctgatcccaaagacaaaccggctgcctccttctcttagggccaggcgcttgagcattccggctatatccgccagccatctctcctgctctgcctcccccacctttcttccgggaaaaatcaggaaacagatttcttctttatggagtttactgatacaaaagcagaacttactaagttccttttccattttttcctttagatcaaggaaatgctgtctgtccagcggctgctcctgatccagacttctggctgagacgatgatacagccggtgtattcctgttccatagagctttgcagcaattggaagcttttggcatccggctcgcctagaagcatggaggacagaaattcatttcccagaactgtgttcatctcaagaatctgtgcttgagcctttttctccttgtcaaaccgcttccattccttttccagcagacggatgaccttatccagggtgtcgcagaaggtatcccggttcaaaggcttaagaatataatcacaggctccaagaagcatggcttttttggcatattggaattcactgtaggcagagctgatgacgatcttcatggttttgtttctggtgcggatcacttccagggcatccagtccgttcattcccggcatattaatatcaacaatggcaatgtccggatggtatttttctgcactggcgatcagatcgatcccgttatacacgctgggaaccacctccagctggggaaaatcattctcaatcatcatctccagcgcccggcattccaccgtttcatcatctgcaatgattattcggtacattcgtttccctccccctgtgtcttcctttggccagcatagggcagggtgatgcgcacccttgtccccttgttttgaatactgctgatctccatctgggcttcattgttaaaaaagattctcaggcgcatgtatatattgcttagcccgattttgttcttgatccggttctcctgttccatttccctgcgcaccttgttcaattcttcctctgacattcctataccattgtcacagatctccaggattcccttccctgcggcttcctcatattctgtgcgtatgaggatcaccgcaccggccattttcatccccactccgtgggtgagtgcattttccacaagaggctgcaggatcatgcagggaaccttcatctgatgaaaccgttcatccaagtcaaattcaaactgaatccgctctccaaaccgatattcctgcagttccacataatgtcccagaacctccagctcctttgccagggacacagccttctctgtattgtcaagggtataacgcagcaggcgggcagtgctgtccaaaagctttatcgtctgctctgcatgctccaggtatgcagtctgggatatcatattcagcgtattaaagagaaaatgggggttgatctgcatctgaagggccttcagctcgctggtcttcagcagattcctgatcttcaaattttccagctccttgtccttcagccgctccatggtatctgcattttcctgaatggtgcggatctgtgcctgtattcgggagatcatagaattgtatacctggatcagcagccgcatttcctcctctgtatccggctcctgttccacgtactggaccacctccatgccggtatctcctattttccgggcactctcggtgagtgcatgcactggctgtatcacccggtaggtgagggcgcggatacggcggctttggtgaaagagaacaaaggctattaccagaagcagataaataaggccgatcatgtttttcttctcttcctggatccgtctggcacggatagaatccagaagctgggagtacagactttggaattcagaggtaagggcctcatatacctcctgagtctgagcataatacttattgatcacagccttgctgccgatggtaaattctgcgcagagatagctgtggtcatagatccgtccaatacaggtggtgtaggtaaaaaacatttcctccagatcccggatatccctgtaaaaagcagggctcacctgcatatccgcaagctgggcaagggttctgcggttgtcaatacatgcatcggtgataaggcggaagaccccctcatccccttcaagggtataggtatagacatcttgattgatcccttccaaattggaataaaagctgttgagtttcagcatctggtcattacttttttcatattcccggcgcatgaacaaataaaaagccatgatcattaaaacaaggatcaaagagatgaccactgtgccaatgagaaaacccagcagcctggattttatggaaccattctttttcatagcagcctccattctccctgggcggctccccaggaggcctgccatgcctcaaaatcgaagtccttcccggcacttttcacttctgtatactggacctgctcaatcccaggactgccattgagcaggtccctcagacaggaaacagccttataaccctgtgcgtaggtatcctcaaagacagaggaatcataccagccctcctggatatagctgttgatctgctgtgacattcccatacagatcacatgcatgtccccagcaggatacccctcctgctccagaacttctcccaacatgtctgccgcaatttcatctgaacaaaaaatggcattcatatccttcttttccataagcatctgctgtacaagccggcgtatccgcatcctgtcggaattacactccagaacctgggcaattaccgcatcttctcccactgcgctgcaaaaaccctccagcctttgcttttgattttcatcctccaggctggaaacaatgatcccaatattggcattttttccggccgccttggccatctctttgccagcaagctccccggccgccctgtggtccatgccaatataacaggtgcgctgtgaatccacaaggtccgcgttcaccaaaatcacaggaatcccctgatcctgtgcctcctcaataacctttctgagcttttctgaggcattggtgccggccgtgataataccgtccacattggaatagatggctttttgtatggcctggacctgcttgtcctcattcaggtttttaaatccaatggattttgtattggtacccagctcctggtctgccgcctcgatccctccctttacaccgtcccaggttaagggacagacaaaggtaaagcgataggctaagggttcattaacgccttgtggcgcaccgaagaatttctcaattccaaacagaaacaaaatgctcaggccgattaagcatatgtattttttcataggtctcctttctatttgtcaaccaaaataggctctgacatagaacagagcctaaattcttcggtttcaagatcccattgggacggatacctgccccatctcagatttcattatttatctagctgccgcttttcttcacttaattccccaatgtaataaaagcctttgcattccttgagttccacctgcacaagttttcctaaaaggtcttctcctccagggaaatgcaccagcaggttgttgtccattctcccggtcatgaagccttcctggccttcgttcacctcttccaccagtacctcctgtactgttccagcaaatcttgaggatgcctggcggcccttttcctgcaccagcttaaggagccggtcgaaacgctccttcacaacctcctgggggatctgctcttccatgaccgctgccggggtgcctgtgcgcttggagtaaataaaggtaaaagctgtgtcaaaccccaccttctccacaacatccagggtttccagaaaatcctcctctgtctcccctggaaaacctacgatcaggtctgtggtgagggaaatgtccggaaccgcctggcggattttgtccaccagggtcaggtatttttctttatcatatctgcggttcatctccttgagaacccggctgctgccagactggaggggcaggtggagatgatgacaaatttttttactggttctcatgacttcaatgagctcatctgacaaatccttgggatgggaggtcatgaaccggatccgctgaagtcctggtatcttttccacttctttcagaagctgggcaaaagacagggatgtttccagattttttccgtaggaatttacgttctggcccaggagcatcacctccacaaccccgtccttcaccagcttttcaatttcccccagaatggcctttggctccctgcttctctccctgccccgcacatagggcacaatgcagtagctgcagaaattgttgcagccgaacataatgttcaccccggacttaaagaaatatttccggtccacaggaaggtcctccacgatctgatccgtatccttccagatatcaatgaccatccgcttagagtccatggctgtgtacagcagctcggcaaatttgaaaatattgtgggtgccaaagatgagattcacaaaggaatagctcttcttcagcttttccaccacatggggctcctgcatcatacagccgcacaggccgatcatcatgtggggatttttctttttcagactgtgaagataccccagtcttccataaacacgcagatttgcattttcccgcaccgtgcaggtattgtagatgacaaaatctgcctcttcactgtctgtctccacatagccgatctcctccagaattccccgaagcttctcagaatccctggcattcatctggcatccgaaggtctccagatgcatggataagggacggcccagctcctgtgctttttggctcacccactgcctgcatttggtcataaaaaaatattgacgttcaggctctgtggcaggcggctcctggctaagatcaatggaattcagatctatgtaattaaatatatggttttctttcatgaaaaaacaatcctttctatattcacaaagacaaccccataggagtatccttggggttgttcatagggtacgtgaatattttaactgatagggcggcctttgtccagctaggaatagggattttttcatttcacttttttcgtttactggtgcagcgtactgtctgcccagccctcttcaatggcggcattgcagaccgcatcaatggcagccccagtctcttctggcgttttggtcccggccagcagttcatggatatggggatagaacacgtcccgcacgccccgccagttggggttgttggccgtaaaatccaccgtgttgacggcattggctgtataagcttctttcataaagatatgctcactgacacgctccgtagtggccctgcttgccggcagccccacctgtgcgtgatccatcagctcctcattgccgtagaaatagcttacaaaggctttggccgcctgaagcttggcagcgtccccgttgtcaaagacctcaaagccagtgacaaacgaggtattatatccctttgaatcctcgctggggaagttcacaagacctgtggaattcatatccatatgaactgccgtggcgctatttgtcatataaatccccaattgatcatttgtgaaaagggcattgcagtcaatgatctccatgttctcacatccagccgggaaatatccttttttgtaggaatccacaatccattgaagggcagcgatcccctctggggtattgatatggaaccggccgttttcatcgaagaactggcttcctttgctgcgcagcaaagtcatgatgtgtgtatccccctgatcattcttagcgtacatcatcatggggtaggacatctccggcagcttttcgcccaaggtggaaaggatctcctcccactcctttggtgtccaactctggatctctcccacctgcccgatgtactcatccagccggcactggcggaacagctttttattaaaacacatggtgttttgcaggctataataaggcagcatataggtttttccgttcacctggctcatttcccagctggcagcatctatatcgtcgcgcatggtatcagtgatgatgtcatccaggggaaccacacggcctgtgtgaatatacccggccatattaaaatagccttccaacaaaacgtctgcggcatcctctgtgtcgaagcagcctgtgatgaagtcgtcttcctcagtataggcaaactttatcacattcaccgtcacgtgggcttcgtcatactgagacgcaaactcctggccggccttcaccagcaaatcgtaagcatccgtaatatccgtatgggcgtttacaacggtcagcggcggtaccttgactgtgagagtcacctgcggcttgtcagcctccttggttgcacatccggccgccccgcccagggcagctgtgagaatgatccctccagccaacatctgtttccaatttttcatttgatcggctcctcccttattctgacagattcagcatctgcatcagatttttcacgtcaatgggttttgcgataaatccatccattccactttcctgggcccgttcttgatcttccttaaacgtgttagccgtacaggcatagatcttgaccgtctttgcgtccgggcggttcatggcccggatgatcttggccgcttcatagccgtttctcacgggcatctgcacatccattaaaatcacgtcgaacccatggggcgccgaagactcaaacatctcaaccacctgtcctccatctgcggcgtaagacaccttgacccccgccgccttcaacagctccatgagaatctcggcgtttaattcattgtcctccgcaatcaaaatctttaattgcctgcccccctgcactggaacgggcttcacctgtgcaatgacggcggtactcacaggtttatccccaatctttgcagtcagcgtaaaggtaaagcagctcccttcccccagcctgctccttacagccagagttcctcccatctgctgtgccagcagggaactgatggacataccaagcccggtgccctgcatcccagcggagacggcattgtgctcctggctaaagggctcaaatatttttctctggaactcctggctgatgccgcagccattatcctccacctcaaaggtggtggtgatcctgccggcatccgcctcacactgggacacccgcaggaagatcgttccgccattgggcgtatacttgacagcatttcccagaatgttgatcaggatctgctcgatccggatctcatccccaacgatgctgggtgcctgtatgtccagctggatctgaaaacggatccctttttcctccgcacggccccgcatgatggattccaccatggaaaccaggtggtggatggaaaagggcttgaggatcagatccactttccccacctgaagcttggacatatccagaatatcatttaccagagacaacaggtactttgcagtggagtccgatttgccaagataatctgccagcttgtccgggtgttcaagattctgctgcattagatgattcagtcccactatcccattcagcggcgtgcgtatttcatggctcatgctggataggaagtccccccgggccctggcctctgccttcgccgttgcggaagccgctgccatgcggataatgatcagcatcatcacacacatggccaccgcaaccactgtaagcattatggctgtcagggtgacaaattgctgtgtctgttcattaaataccttttcaggaactgtcagaacgatggtccatggcgtttccgggatagggacaaaggaggacacttgagcgccttgcctcccattgtcaaaatactcaataaaggattccccctgatccaggcggtgaatgagtgctttaatctccccttcagaaagtccggctccctcccgaagctcttcataatagttatccatcttctcaatcccggcccttcggttgcgattgaccacgtaatttccgctgctgtcaataattcctgtatacccccgtccatcgaagctgtcaatcttcaggcggttctcgatcatattgatcttcgcaaagccaatgatcccaacaaactccacgtcattcacctgaaaggggtcgcacctgacaccgtatacaaggctctctctgatcgcctccaaaacatccatttcatcataccgcatgacgaaccgctcttttccagagagcagggattgtacgtacacctcattactgccatccttcaccacgtttgtgccggaatagatattcccctgggaatccaccaaataaataagatcaaaggcatcggttgtctgttcaatattcaggcggctgcagacatcttgtatggtactgcaccggctggtcagcgtgcgggaataaatggtggatatttcattccaggaactgttcagttcgctttgtatattccgcaggtcatgcccggacagttctttcatgaaggcaaggaccgaggattccgttgtacgggagagttgattaatatatgtacagacggccaatgataaaatggccagagttgccagaatgacagcttggatcctgcccttcttccagttcttcatatgctccctcccccgactgtgttcatgttattaatatacactataacaggattcttcggaaattgcaattgccgcgagaagttcttggagcttttttgtcaattatgtctgtacatgtaaattttctacgatatctgtacttctatgacttcaatgtcattgatattttctattcttagaagttttgttcttatctgattttttttatctgtaaaacgcacttttatccattcatcgtctgaatctaatacaagacatttcatttctgcatttcccaccaactgtaatgcttcctcgcatttaatcttgcactccttatttactaattcactgatcagctttgacatactattctctcccctttgctttctctctaatctcttaattgtggcttcaagccgttttactttgccaggatatgaaatatagcaaagcataagacctaaagcaaccaatccagcccattccattattttcctccttaaatgctgtcttattgcgcagcttctcccgttacacgatcatccagtcaaaagatcgtccatgaaacagcaaacctgcacgcatctattttctcaggcattccactccattgcatcctttggcatagctgcttcatacaaccctcgtttatgaaaattgtaccactccatgatcttatcgtcaggtgcagctttcaaagccagcaggacctcttgggcaaattccaatgcggctgttccattagctgtaataatattgccatcacggactgcctgctgcatctgatagagatcttcccctgtataggccggccccgcccattgtttcaggtcattgagatcattactggtatgcttcacatgattcagaaccccaagtgttcccagatatgcagaagcatcgcagatgcctcccagtatctttttgtctgtgagacatttttccaccaggggtttgattttgactgcattctcattcctccatgacatgccgccgatcaagatcaatgcttcatagtcggatggcatgtggtcaatgctgtgatcaggcgccacacacagtcctccaatggacctgaccaagtctgttgtcaggcccactgtcttaacctcatagtctccatttcccagcatatacagtgcagatgacagatacgccgcctcccaatctgcaaattgctccaatagtacgaatagaatcttttttttcatttcttttcttcccttctgcacttattgtgctatagtttttgtgtagtgctcatatcatgtggtatctttattccgctgctacaatagattctctcagccgccattatctgtgttctttttttaccctcatattgcataattctgatattgcaataagcattctggtatgatacattttcatggcatcccccgcgatctccttatattccttgcaatttatcatatatcgtaattcgatatgccgataaacgacatatttggttcttatatcgtatcacgatatatatcgtctgtcaacataaatctagaaggttaaatactgtcattccacattgcatcggtcaatgcaaagtgactactgccattaagaaagactataaaattaatacagatttggctcccggtaaaagacagataggccatcagatattttttagtatctgatggcctattctgccttaccctatttttccaaatctccgtcttctatctctgcatcctggccttctgtttcaccaaccggtacatccgggggaagtgcctgcgtctgagcatcactgccttcttctggatcagaggccggcatggcgcccctgtcctcctgcatcagattagcgtcgtcttccataccctggctctccttttgtccaaggtctgaaggggcaaggactcctccatccgccagtttttggagttctcccactgcccactttggaactgcgcttagatctacagattccggtgccagcctctcattgtttccctgcggcgcaggaagttcaccaaacgccctgccaaccatgaccaatgcctgcagccgtgtagctgtgtctttctcttcaccaagatctgcaaggagaatctttttattacattctttgttataatcatctgccgcatttaccagataatctgctatctctcccaatgcagccggttcttccgacaccttgggcaaagccttctgtttattagtgctgaaggcactaagggtcatactaagggccagaacccctgccaaaagcagagccgtttttcttatcttcatggatatctttcccttctatatgtctttgattggttttcccgtttcacaagacggattatagcatatgaaaggttagataaaggttagattttcttataatgaaatatgaatcctgccaccactactctgctcaattaattcaaaggtttccgaatggaaatttgcataataacgtccgctgtgtgccacaaatttcaagacacaataatccgggtccgtcactccctctggatagtacatggtgtcaccctcctgccagatcatttccttgcttgcagaatcctctagtacctccatatgtccctccagcatgatacctctaaaaaagcgtttgtcataaaaataaatactggcatttggattctttctaaattgacctacccgcatagaggaggtattggtggtaaaataaaattcccgaatgcctgtccgtttgcggggcggaagcattgctttcatgttcggaaagccatcttctgaaatggaagcgataaaggaaaccttctgtttatcaattaaattcccgattgttttttcagcatcacgcagcatcatgtactctcccttcgatttatctttcatttcttgctcacagcgtgttaaaaaggctggttcttttcgttacccatgcatttcatccatataaaaatgacaattacagttgcaataagaaattccgccaacaccacagccggattccaaatttcaaaataaaagtgtccgattatatatacagcaatgaataacaaatagactccaatagaataggcggtgcaccgtatgacctgactgtgctttctttcccggatcagtatttgctgctgctgtttttctaatatttctgtctttacggataattcatccatttcagatggttttaaaagagaatcggttgtcacatcaaaaatcacacttaatgccactattttttctaactctggtactgcctgtccggattcccattttgaaatggactgtcttgacacattcattttttcagctaactgctcttgtgtcaacccctgtcccttacgcagctgcaatagcctttctgaaaactccatttatatatcctccttaattttgatgccccaagagtagcaaaattctcagttgcattccatataccaggctgtatactcccgcaacctgcggttgaaatacgtacacaaatgactgccattagtttgtcttggaaaaccaggcaccggccctctctatgattatgccaaagacagtttgtatcatagacctactagctgttgatggctgtctcctgcttctcttttcgaaataccggtgacagcagaaatcctccgaaaataatgccattaagcacaagtaaaggaataagcattctccaagacatggactggttgtggatcgcttccacagagtaggtgctggtgatgacggaaagcaggtaattattcagaaaatgaaggattaccggcacccatatattttcagtcttcatgtaggcataggcaaaaaagatccccagggtgatacaggtgatctgctgtaccgccatactgataatcccatcttttggactggtataataaaagaaatttataggcatatgccacaatccccacacaacacctaagagcagcacgcccacccgcctgccgaacaggcgctgcaaaagaggctgcagataataccgccagccatattcctccccgaaaaaggcaaggaaggcaaatatgaaattaatccaaatcaggcccagcatatgccaagtcacaggattggctgcaatctgtcccattactcccagctggccggacatcgccgccttaagaagataaagaccaacgaaaagaaggatgcaaagtaccgaagtttttccatttttccaccgcagcccatattgaaaacgcttctccttattttccgtcagcagaaggacgccgcatacaaggcttcctcctatcattataatctggccggctgcctgccaaatggaagcagcgctcaggatactggcaatggtgcataggatcatcaggccggtaacggccagataagggtaaaagaacctgcctggaatcgcatccgtttgtcttctgacaatcaaatatgccagcatcacaccagcggcaggatacaacatctgtgtattagtaaataaacttacatcctttcccatataatagccaatgcccatgaggatgcccatggcataggttactccgtacgttgcggtcacataaatcaacagctgctttttatcaatttttgacaatttcatcttctctcctcctggtttcacttaattggatcttagccttcgtcctgctttgtaaacagaaatgtaacagaaaatacacccatatctgtctgtatcttcattcccccctgatattttttactgcctggtgcacattcccggatgatagccgccacctgttctgtcactttggcatcatcatcgcacacagcgaccttatacatagatttttaccctttctcttttgctcattataagtgtaacacagtcatataaaaagtaaatactatcttcctgattgacaaaaattctgtattatttgcctggaaacaaaatagtcaagcccgctttaactccccatccccttacttatgaggggaatgaaaaacaagcagccacacctggctccccttgattggggccgtcaggtgtggctgcctgtgtactttttactgcttagtcttccggatattgggatatttccggctgatatttcaggatattatggctcattccattatccggaacaatacattcccctgtgatacaatccgtcagctccgtgcacattgcatacaccactctggcaacgccatccacgcttttgatctcatctaactggggaaccgatatctcatcatacagttcatcctgcttttcctcactaagggaactaagaaccagattgctggtggcaccgggagtggccatacctcccggtgcgactgtatttaccttgattccgaaccgcttcagttccttagctgcctcaattgtcagagagattaccccgcccttagatgaggcataatggggatagcctccaaaaaccggataaggcagccaggcacaattggatgaaaccaatgtcattttcccctgtattttcttctcaatcatatatttactcacatgctttactgtgcggaaggttcccaccaggttcgtgtccaccactcttttgaactcctcctccggcatgtcataaatatgggcatagctccacaccgctgcacaggtcactaaaatatccagtgttccataggtttcatctacaaactgcaccaaattttcaacagactcctccgaacggatatctgtctggcaaaaccgaacccggtccggcccatatccattttcctttaaaacagcaagggcattttcagccttgtgcaaagagccagaagccatcaccacatttgccccgccctgaagcaggcgcagagtaaccacaaatccaagtcctgaggtacctccggtgaccagcgctgttttattcttaacggaaaataactcttccatagaaggcatttctcccaaatactgccgcagcattgctgcatgagcatcctttccataatcttccatagctcttcctcctcttatgagtctcaacaaaatactttatcgcacacggtcagctttgcatcattttggcctgcggtgagcaccgtcccattctctgcgtgcttcacatccacaatggcaaaaccaatattcttctccaccgtatagccgtagatcatctgacggacaattccgcactggacgcccctggcatagacaggttcgttctgcgcaagatcctcatagctgtccctggctggatccagctccactcccaccagcttatattccagttttttattctgtaaagctattttgcccacaaattccttatcctttttaacagaccagtcaagccctgcctcgtaaggagtcagcccatacagatcctgacggagagggaagcccttctccatgggaagggagcggacatagacctccagtattccaagttcccttgcctggaagaccgggtcatttttcatcagtgcttcacaaaggaccgggctgtccgttcttctacagtaaatttcatatccgttttctcctgtaaaacctgcccggtggatctttacacacaaatcaccgattttgttttcttccatatgaaagcgcttcatcccatccaccggaaccgccagcaaagcattcatataagccagtgaattgggcccctgcacagcatacatatccatctccccagtaaggtcccgacagctcaccagctgtttttccttatacttattcagccaggagataaacctcgggccatagagagtcgaaacccaatatactgccggccccatacaggtcacaatggtatcgtccagaatttttccatcttctcctaaaatggtggtatatttgctcacccccggttttgccccggcaatgtcattgacacaaatataatccagaagcttacctgcatcctccccggacacctctatcagatcatgggtccagcggtaccagcccacattggaccgcacagccattgcctcttctcttgccaaacaatcctcacgaaataacatgttccaagtcctcccctctaaatcattcttttgtcgattttgtgtccgatcacgatttccatctcttgtgtatccttattttcaaaccacacggaaaactccggaccaaccatggtttttaccccattgtgccacattgtttcataaccaagggtgatctcatccactggcgccatctcataacgtccgctgaaatcatccccagccacatggattctggtctcttccttggtaaatgccgttaattcacagggaaccagctgacagtccagcataaatttaatatagcttcccatgatcctggaatccttttgatccacatggtgaggtacccccaagtaatttctcaggccctctacagcgaagggatcaataaactcattttttcctgctgtggaaaagacgattttgaaaattcgttcaaactcctcttcctgttcacacatatcacggatggccagcatgggaaaagccacactccacacccagcccatctgcatcacccagttgtaggcccaatcaaaggacttctcttctccaaaggcattggtatattttccgtttcgtatgatctgcccgtctttcacggtccttgactgtggcgtttggtgaactggatgaacaggatcctgcatgtggtccatccatccctgtttgggcagtccgttcacatctcttcgctcagccactacccggcagtgccggtctccgcagcctctggcctcacacatattcagagccacttcattttcatgatccttagaacatagatcaaaatttgcagtaaacatggcggtagtcatattgcacagctccgctcccacaatatcccatggacaggtatccagctctttctccacccggtcttttgtaaactgaatgacacgtcctgccatattttcatattcatccccggaatccccccagattgctccaagccaggcagacttttccagaaattccggcatattccactcatcatagtaccctgccatatactgctcagatgaagccgccatattaaactggtaagccacttggcagatggcctctgttcgtttttcaaaatccggctccagaatcctcatcacttgaaaaatgtttgcacaaaaggctgcaatatgacgcaccccaaactcatagcattccttctgagggattaattttccccagagggtttctacacatttctgctcctttagtttctcatttaaagccataccttctcctcctcttgctttttatagagtcttttatccattgtagatgcgttttctgtttctgaacagcctataaagaacaggtaaaatcccaaggaatcccctacaaaatatagggttttaaacatagagcaggaatcctggttgagttttgtcaaaacctttgataaaataagaataagcttagaggaggtccttattatgaagctgaatgcagctattatttatgattgtctgaaagaaatcataccaatcgaaatgtatggttataaaaacaagacccttacacttaaccgtccagaattttatatagatgacaatcagccatttttaaacgatcatttgtatattcttactggcatgagtatctcccggaggatgaccattgaaaaaggagctgtgatcctgtgtatgggtgatgtctcccgtttttctttttatagggaccgatgctgtgttttgaaaataaaggcacattccgatccctttgtactattcaataagataaacgatattttcaatcgatacgaagcctggaatgatcgtctgtgtaaaattctagaaaccagtgcaaatatggaggaaatgctttgtgcttctgagactgtctttcataacccactgcttcttctggattcagattttcacatcattgcctccgcaggctatgaggatttaaacaaggaatccatctcctttaaaaatatgggttcggataccctgagcatcgctgccctggaacaatttctaaaagaaaaggagcttctcatggacaaaacagagcctctgctcctcaatattcaaaatgtgaccacctgcagcctgaatctgtttgatatgggacaatataccggcagtctcactgtggaataccgaaaaagccctcatcaaagcagccatgacatcctccttccccatctttccgcctttcttctccaggctatgagaaaaaattccatgaccagggcaaaggacagccgggttttaaaacgtatcttttctgatattataaatgggctgcctgtggatactgcccgcagaaaatatgtggatgccatgagaatacaaaaacagtttgtatgtgccataatgcgcatccatgaccggtttgcccagattccagtaaaatatatctgtgataaattcaccagcattttccccaaaagtattacctttgaaactggccctcacgttatttcctttattgacacccttgatctttcccaggaagaatccctggagaaggcccttactgaccgaatgggaatcctcacaggagccatggatattcagattggaatgagctatgtattcacagatccctttgacgctgccctctatgccgcacaggcacaggcggctttggagaacggtatgcttatctctccaaatgaaaactgctattttttcaaggagtacgcactggcagatatgctccgcacgctccagaacaatactgcctatgatatgtatttaccggagggactgaaccgcctctttgaacacgacaaaatctccagtgccagctatgtggagaccctgcgtgtctatctcaacaataacatgagcatcacttccacagccgctgccctctttgtgcaccgcagcaccctattggaacgcctctctcgcataaaacgggagttgaaccaggatctcactgattcagacacacgcctgctccttcagatcctcctgaaatcccaccaaattcaaaagaccattgtggaagcaagtgaaaaagaacaaagcgggcaagctcacttcaactccccctcccctcactcatgaggggcttggcagctttgtgcgccaatgtgcagctgcaaagcagctttcctttgtaataaaaaaactgcagcatccgttctttatgagatgccgcagtttttccttatcaatatatgtttatctaaatttcatcactcttccagatgtgcgtcctccagctccttcgccagggcatccacctgttccttgctcattcctgactgtgggaaactcatgagctttcgcaatgtcagcccctgtacaagcttcatctgagggtctgtagcaaatcctggactgaccttgctgataatttccactgccttttcatttttcttcaatgcttttacttttgaatcaattgttaacatatcccattcctccttaaatttaacgctcttcagagaactcatgatttttatcagatcccctaaccagctttattatagcgcccttaacggaatggaaacagcctgcataagtatggaaaaaacaaaggcagacccctgcaaaatgtacctgccatgttctcctacgcactggtttattgcatttcatccttttgaaagccatctctgtggcatatatttttaaaatgatcgtcctttattcctgtaacttcttcttttattctctcgatttactaccttgatctccaaatccttgggcaatccataaaattgtttatagtatttttggaagggactggatcggaagggcgtgcctctccatatgtactgatcataaggaagtctttccacggtcacagttcggactccgttctcatactgtgcccgcatagtgttcaagctgtccataccagccttgtgaatggtaccgaaaataataaaataaaaggctgccccgactgcacacatggtatacaacacgctcctgccatggaccatcagagatggatttaaaaatctggtaagtatctgtaaaagacagcctgcaaggagcaccaggaatatataggaagcaaaaaagcaacggctgttcagcggttccacaaacaacagcggacctgtgactaccactacactgcctgtaaggaaaacaaatttcagcacacagccataaatcttccccatgatgtatgtatatacaaaaatggcaagccccgcaactgctgtaaaaattgcctccattctcattaaatacagggttttatcagcactgtccagtcccaggctgatcagtccgtaagccccataggcagcgatgatccccgtacagatcttcatccatttggcataggtgagtcctttggcattttccacgcacttccaggtgagcaagatacagatgactgccataaaaacattcaaggccacattctgcagaagcacatccttatataccactgtcaaataggaatggacagcccgccgcagcacattgtccttgctgatcgagcggtaacggtcagccccctgaagaaccttgtgataggaggaattctggaacatgagaatggttccgcttacaacacccagaaaataagccacatgctgtacccaaatctttttcgtcttaatcagcagatataccagtaccgcccctgacaggcacaggtgatagatggtcaaatgctccataatgatcgtattcaccacccccaggagaaacagccctggaatatgacggtacttctgcactgtcaccttccttccctctataatatcccagatataatacaggtagatcaatgtggagagcatgggtaccacatagttggtaaatccagatgtccaagtaatggtctggatcaaggtatcttttgggatggctacaatggcaaggcagaagaaggcgaaacaaaatccgcttttgtaaaccagcttgtccatcagatacaaaattccggtgatgatcagggcaatgcatacggtttttagaaaatcggagcgggtgagcagcaaaacaagcagattacccaggtaccttccgttgtaatctacaaatccgttctccaggcgaagccatcctttttcagttccccatataaaatcatcccatgtatagggaatgaagtatgccaaaaccaaccatgccgcaaaggttaccgcatactttccatatccggatcgtattttctttttcatttttctttcatagctcctcagattaaatttatcagtcctgtgaacacagctgatacaaatagagacggaaaatagttcctttggttgcagccacgaactattttccggaaaatcctagtacaatatagtatatacataatcattccaaaaaacaagatggaattatacaaagatgtgaaaaatcggtacactcaaatccaattgatgcaccgactttttcattatttactttctttcctattttttattttccaggagaatctcctttttcttcccattcccactccaaaaccgacaattcataggcagtatgtttctcttctcttccatccgcatagaccttatcatactccctgctgtgaattttaccttttatggagatcagctttcccacagggatatcttccgcctttctggctttctctccccaacagatacagggaagataatagctgcggcggcaggaaatgttcactgccagaagcagatctgcgatttcttttcccaggggtgtcttgcgatagactgcctttttgcagagatatccctgaaggtatacttcatttacatctttttcagaagccacaggaagaatcgccagctctttggcaaatacatagagctgcagatgcttgacaccctttcccgccactgtccgagaacgatattctcctttcactttcactgaaatacctttatatttcatcagatcattcaaaagaatttctgccagaataagagggattctgtccgcaaagccgttgcttctttttacgcacagaacggcatgataaaatctctgcccatggacttcatgggagaaaaccggctctgtatccatggttccctttagaattacttgattattattatattcaccagtcacaatctattcctttccgaaagacccctgattttcaggatgccactttcctgtactgcaggatctctttttgttgaatctcatcatattccctacatatatcattcaccttcgcaccctggcacagctttacacaaagttctttaatggtattccaggtattgaagggcagcgtaaagtcctggttcggcacctggccgccgccagctacacaggcagccagctcatcggcctgaggaagggtggaggccttatttcctctggcggatgagatcttgcccagactggcagaaaaattattaagattttcctccgttcccagggtttccacgatcataagtgcttcctgcagatgcttggatttgggatttaccgcaatacgattgcctgcacccaccacacagatctccccattgtgaagaactggcagggccgtcatctgaatctgaaagggataatcataggaaaatgcctttgccctgcataaagcgctgataaaggcacatttttcctgtgcaaaatattccgattcctccgtactgttggggagcgtattcagggcctgctccacatccatgtatcccttgtctatcatggtctgcaggaattgaaatccatctttcatataggtactgatgggtgtttctcctgtttccagctccattagaagctgcttctggccgggatcctggtacaaggctcccaggccggcgcacatggcaggtacactcagaccaaaatctgtattggaaccataggggacaattccattttctttcaaggtctcacacacggtccaaaactcttccaaattttttggtatggtcatatcatacttctgaagcaagtccacattccagatgaaaccgaagcaggaataggacaatgggatggaaaaaacctttccattgtaaacgctttgctgcagggcatcttccgacagactggacacacaggctaagtctgaaagatcatagatatagcctttttgatcaaactccagcacatcctctgccggaataatgtacagatcatcagactgaccgctttccatgcgcgtgagcagcaattcccgataggaaaggcctttctctccataaaaatctgccgagtcactaaataaaataatgttgctgtcattttgtttgttaataatattgttgcagcatacctcaattgcatctgtaaccgccgttccctgggtaaataaggttacgacagtatcaggttttttttcatcaatataaatttccggcttctcactacctccacaaccgctccccagcatcaaaaagctaaggcccatgaaaaatataccaatcctgcgctcttttttaagtttcatcctctgtgcccctgctttcttttttttgatactgactgacaaccgcaaatagttttgcgatatctatgggtttggcaatatggtcattcatccctgcagccttacatcggcggatatcctcctcaaaggcatcagcggtcatggcaatgatgggcagcgtgcgtgcatccgccattctgcgcagctttctcgtggccccataaccatccataaccggcatatgaatatccataaacaccatgtcataataggtaacacctagtctttcaacagcttgtactgcctgcaggccattggtcacactgtcaacggtcatgccgctttgggtaagcagctcctctgcaatttcacggttcagtgcattgtcttctgccagcagcacacggacaccttgaaatctctccccggctatggcgtctggcagatttgtcccgctaacgtcattgcccgtactgtcaaaatgcagcttttggatcagctctgatttaaacaccggcttagagagaaactcatcaattcctgcacgtaatgcttcttccttggcatcttcccaatcataggcagccagaaggatcaccgggcgctctttgccctgcacgcttcggatcctgcgcacagcttcgattccattcatatccggcatctgccagttaacaatcatcccaaagtagtcattgcctgtctcatgggcctgaataaaagcatccactgccgcctgcccgcttttgacaccgctggtcacagcccctgcctcttcaagcatagaccgaatcccttcacaggaggccggatcgtcatctgctaccagtatccgctgccccgaaaaggtccaggtactccactcctgcacatggggcagacctgcggggatcattacggaaaactttgtgcccttgcctaattgactttcaaccgtgattgtgccgcccatcatatccacaatgttcttggtaatggacattccaagtcctgtgcccactgccttgctcacacggttgtcctccgcccgctcaaagggcacaaaaatcctggcgagaaattcttgtgacataccgatgccattgtcttccaccagaaaagaaacgttcactttacccccgggctgcttttgctcctgtacctgcagggagatggagcccccgactcccgtatatttcactgcatttgacaaaaggttatatagaattttctgcaaatgaagggcatcgctgataatgacatcgtattctaacactgcggattttacctggagtttctgtttcttttttacaatatctgctttcataaaggtgagcagatccgataacaattgtgccaggttcaccggttcctggttcaaatgcacctttccgctttctatgcgggacatatccagcacctcattgatcaatgcaagcaaatggttggatgcggtttcaattttcttcagacagtccttcaccttttctttattatccagatttgccatggcaatggccgtcataccaacaattccattcataggtgtccggatatcatgggacatggaagaaaaaaaggcagtttttgcccggttgctgtcctgggactgccgcagggcgtcccctaagtcctcccgcatacggtgttcatttgtagtttcgctgaagactgccaggtattgccctgcatctgcaggaatcatatgaatctctacccaccgcttcaattccttatccctgccaatttcgtattctttacgcactttgtcagagagcctgccctcaaaaaaggcaacacgatcagggtcgtctttgggtatattgcattggtcaaacaaaagccccggcatccccattacctgttttgggttcagctcaaataaaatgcttacattctccgagaccatctccgcccgctgtttcgtgcaggaataaagaagaaaaacaaagtctatatttgaagagatattctgaaaaatctgttcccggtaaatccgggttttttcattgctcttcatcacctgccggcttaataacagaccagcaatgagaacaaccgcagacagcaggccggccatggttatggtgatcattccctggatttccgctgactcctgcagcaggacccgtcttggaaggattgacagaagataccatttgtgggcattttccatgggaacaaagcatagaaaactactctcacctctgaattctacactaatggtaccacttttcccctcactcataaggtttttcaatgactgctgaacatccctgccatttccctctgtctccagcaagtcataaacagtctcttcctctctcccagtgctgtccatcacccattttccatccgttccccggatcacataagcaagtccggagccgccgccaaaggtaaacaacgttggatcattgtactgggacatggtcttgtccccatagagggtccccactgggacggactcctcatacacgggtgcctggaaggtaagctgagagcgtccgctgcttcccacatacacatctgaataactgcttttacctggaaaaagaccaatcttgtcaaaagcaagcttctgtcttgtcaccgtctcaccgttgctgcttacgcccttcccatccatatccacataagtgagacaaaaaaactcagaggctaagctataatcggacagcgtttgcacggactcctttaagtcctcacctggagaaaataaatgggcaaaggtttccaatgtctgctggtctgtttccatttccttttccatactgctcaggatcactcttgtggtatttaacaggttgtcattggcgccccggttcatcttttctgtaatacgttccatcaaaattatggtaaagagaccggcagccaacagaacaatcagtgcacctgacaaagtcaccaccgaccgctttttatatttcatacgcccacctcccgagaatcctgtttttcacagtcaaacggtatttctccttccgccgggctgcatggaaacattgttcatgttatctctgttcatgttatgtttgtattttatcatgggagagagcggtatgcaataaaaagtggcagtgctttgagatttgtgataaactatataccatatgaaagggtaaaaatatggacgataaaaatgaactttctcagattatttatgactactattccaccagaattctttttggtttttattcctatggagattttctgccggcaatctctaaaatatgtgaccgctttcatctggcgactcctaccgtacgcactgcattgcttcgcctggaaaaagaagggtatcttgccattgaatcaccaaaacctgccagagtgatctaccgggccgaaccagcccagattgaaaaaagtattgcagactatgtcattccccgggaaatctggctgcgtgatatttcctattccagccggctattaattgggccatttttaagaaaaggcctggagaagtgggaaaatgaacagtggcaggatttcttttgtaaggcccaggattttctaaacgtttccattctgcccatggagcttcatttatctgttttggctgccacaggcaacaacctggttatgaatttctattgggagatcatccgctatatgtgttttccctattatgaaaaaagttttgaatccattcaagcttcctttaaaatgctggaccaaagacctgcccgtgaagtgggcatccatcttgcccatgagctgtacaagcacagtaaggagtttctggatgattttttcaactatattgaaaaaatcaagcttacttatttacatccttcgaaaaaaatagaaccgattccatttacctggacggtttaccgccaaaggccccagcttcgttatacccttgcctcaaagatcattctggaaatcattcggaacaaatacccagaaggcagttacctgccctctctgtcccagatgaccaaagaatacggagtatcattgactactattcgccgtaccttaaaggttttgaccagttttggggtgatcaaatcctatcaggggaaaggctccttggtatgcatgaatcctgaggcaattgattttaccaatacagatgtatggaggatgcttgcaatttatgtagacagccaccagtttgtggcacagacgatcgagcttgtgtccctggacactttaaaagccgtacaagaagaggaactcctcgccctggaggaaacgtttaccctgcttctggaaacacgtaagacctacatgctttttgaaacctacctgaaatttattacggactattgtccttcgcccattgtccggcagtgttattctaagctgaaagagctccttgcctgcggttttcccattgcccctttgtggatccagaaccggcggcttgatttaggcttttctaaaaaggtagaaacctctctgacctatttaaatgcacgggatttggaaaaattctctggatactgggggcattttatgaaagatctggaatttgaaattcgaagcttttacgaaaagcaaaagttaaaaaatgaaaaatgactctgtgaaaaaagcgatcctccaccttgtgtcctggccacaaagctgccaagcccctcatgagtgaggggatggggagtcgaagcgggctcgcccgctttgtttattcctcagcaagcagccctcaatctctcgttttatggattagtttttattattgctatataaaaatatataattattccttatgaaaacattttggtataataagccagaaatgaaaatagaaagagagaacaatcaatatgaaaacaattcacaagaattacaagggtatcttattttgcgccgccattgcgattccttcggtcttgctgggaaaacgtttcgaagtgatcggcggtccggtatttgctattcttttgggtatgtgtcttactctttttgtaaaagagaaggacgcgcttctgcccggcattaaatttacttctaaaaaaatccttcaatatgccgttatcctcctgggctttggaatgaacctgacagacattttggcaaagggaaaacagtcccttcctgtgatccttatgaccatctccacctccctggtgatttccttccttctttttaaactcctgaaaatgccttcgaaaatttccaccttggtgggcgtgggctcttgtatctgcgggggatctgccattgccgccacagcgcctgtcattgatgccaatgatgaagagattgcccagtcgatctcagttatctttttgttcaacgtgatcgcagccctggtcttccctgcccttggtgctgctcttggtcttaccaatgaagggttcgggctattcgcaggaacagccatcaatgacacctcctctgtaactgctgcttctgccgcctgggacggcattcatggcagcaacaccctggacgcggccaccattgtaaagctcacccgcacccttgccatcattccaatcaccttgatacttgccttatggcagatgcggcaggcaaaaaaagaaggacaacagtccggcggaacctttgacctaaagaaaatcttcccgttttttattctgttctttatacttgcctctgtgatcaccaccgtattttcactgccggtgaccgtaaccgctcccatcaaggaagtgagcaaattttttattgtcatggcaatgtccgccattggctttaacaccaatcttgtaaaattagtaaagacaggaggaaagccgattttcatgggcttttgctgttggctgggcatttctcttgtaagtctgggcatgcagcaagtgctgggcatatggtaacaaatcattgacaggacctctcctatcctctatacttttatcataaacttttaaaagtttcttattaaagttctggaggtattttaaatgaattctaaacttacagccaagcctcatcttctcaaagaagcgaatctgtctctgatccgtcagaccattaaatccaaaggcacggttacccgggcagagattgtcgcggaaacaaagctgagtcccaccacggtgcgttcccttttaacagagctgatcgcagacagtgagattgaatctgtcggttacgataaatccagcggaggacgcaaagcagaacgcttccgctttcgcacagaccgctgccaaggcgtcgctttttgtatcagtgataaacagatccacgcccttttagtagatatctgtggtaaaattctggagatcacagagcttacggcagaagaaagtcaatacgaacaggtgcttatctcttatttagatgagatcatgtccaaaagagagattaaatccattggtatcggcgtccctggcattgtggacggcggcagctattggaagaaaaatattctcaccaatgaattgtatcagacacctattggaacaagacttgcagaaaaatatggcatacctgtcatactggaaaacaatatcaatgctaccgccatcggatttggccgctgttatgaaaaaacttatccggaagaggccggaataaatacaaatatggcctatctacattttgaagagggctgcatcagtgccggatttatcgccggaggccagattcttagaggctgcggcaattttgccggtgagctgggcctgatccccatggacgatgaccgttatctggatgaatggcttgcagatcccatggatgacctgcaatataccaatttgatcatcaaagtcaccacctggatctgtgccatcttaaatcctcagtatgtggcactaggtggtcccgctgtgcgggaaagctgcatcggccccatcagcgacgccctgtgcgcactgcttccaaagcatatgtttgcccaaatcctctatgctccagatgtatggtatgattaccatgacggtatggcctggctcactgcctgtaagatgtttgaagaggtgcagatcaggaaggagtagtaagataattaatatctgctctatttgagggcagcattagcaacagaatccagaagctgccaggaactatgaacttccatgacagcttctgctgtaaaagatgaagcttgctcttgcagaacttcttaaggtttaaattccttgtgccacagcctttaaatttgccagtccttcaatggccagctcctctccgctttcggccagctttctccaaatggcacagttgccggccagctcttcaaacttgggatcaaaggactcgataaccagtggtccgcaataatgattttcttttaaggccataaaaaattcccggaagggaaccaggcctgtacccggaatccccctgtcattttcattcacatgcacataccccaggtaatcaccacagattttaacagcctctgtaaagctcttttcctctcttatcatatggaagcagtccagatgcaccttcatgttcccggttcccacatccttgcagaattttaccccatcggatgcaatgttcaggaaatgagtctcaaaccgattgacacattccacacagatggtcacatcccctgttttctttgcatactcggctgcctctctcatacattccactgcccactgccactcctgactggtacgtggacgtttcgtgagatatccccaggctgcataatttactccccctaagataggagcgcccaattcattggcgatatctatgcattttttcatagccagcactgcattttttctgatcccggcatccggggaaatggggtttgtatccagtgtcagcgtggtggtgcacacacaatccattcctatgcgctccagctcctttttcacagccttggtaggaaaacaaaagggatctgagattgcaaaatccaccagctcaaatccaatctcttttgctttttcaatgatccatagatccttttcttcaaaacgctctgcccagataaagctgtctacaccaaatttaaagtccatgtggtacctcccttgctttagaaaaggcggcggtgcctccaccgccgcctctgtctttttttactttccctgagaagacgcactttgcgccatggccccaagggatctgttcttgtaatgctatttttataatgctgtaattgcaaatacgcattttaccggatccttttggaaattcaccagctgatagcttgtgcctgcaggaaggaaaaaagaatctccctcctccatctggaaagattccattttatcaggcagattcacggtgatgggtccgtcaatacagtacagcgccccatccccctcatggctgtctggttctgaacaccgggggccatatcctcctgcaggcaaaatgaactcaccataatgtccatagtcattgctggctataaaacgcatgagcatgggatgttttgtcccgtgtacattattgagcttgtcgcagtctctcactgcataaaccgcctgaggtgcctttctggcctcccttgcgtccaccggccactgaccgatatcgtctgtacagccctgtctggaaatattttttatcacacttctcatatccggaagcctgtcattatttgggcccttataaaatttcgtctcctggtctgtggggatcacctttggaggaatgtcctctccccaggcttttggtgtgataaaatataggactctggctgttcctcccccaaaattgtgcgccttatgccaggcctcctggggcatgtacagcccgtctcctttttccagataggcaaattgaccgcagccgcttctctgcacaatgggtccatccaaaatataatagaattcatctcctggatgaatgtcaagaggatcaaaggctccgcctggccccagctcatatattcccagcataaatgtatctgtggacacaatggtgaatgtattgtcactggtaaatgcattatccgggggatacagggcattggaatattcttcttttctgatcagacggggatatttctttccgtctgtaaatgggaactttgttataatatctaaaagctttggcactggtcatcccttctttctcacttgccattgcgcatacacagaatcgcatcctttgctgctttttttagttcctcataagccactgtgcacagatcatgataataggtgcgctcaggattcttctgaatgacctttgcaatggcaggtgctgcctgcacagacatatacgtgtaataattgatcttggccatacccgcgctgatcgcctgttgaagtccctcaaagcccactcctgagcttccgtgcatcaccagtgcagtttctgggcgtaccgcattgcggattttcttaagtctgtcaatgtccaaaaccggtgactggtcataaaaaccatgctctgtaccaatgcacacagccagcgcatcacattgcgtcctctctgcaaaatctgccgccacctcagggtctgtataaaactgggtcttatcctttgggtccacccctcccgcattgccaaatcccggcattctgccgatctctgcctcaacggaatatcccagaggatgaagcatgtcacacacttccttcacacgcctgatattttcttcgtactccagcatggagcagtcatacataaccgaggtgaacccacatttcacggctcttaaaatataattcatatccagcccatgatccagattcacggcaatgggtacagatgccttcctggcatattccaccataaatggtccgatcacttccatgggcatatccttgtcatgggcacttgcatgatccagtatcaccggtgtctggagctcctccgccgcatccacaactgcccttacgatatcaaagcccggcgtgttgatggctgccaccgctctcttctcgttgtaggcctcctgcataatttctgtcatattaaccagcattcttcgtttcctcctaaatcccctttttctttatctttcctggggacggatgggttttcatccccagttatgtctgttctttgtttctcacttttgaaataacgctctcacagcctgactggttttcatgtatttttcaattacctggctcatatctgtcttcgggcaataaatattggaattcttcacaaatatctcccgtgcttcccctaaacttccatagcagccgcagttcacaccgcagatcatggcaagacctgcggcaccggcctcacttttatcagacacagcgatggtccttccggtaatatctgctttgatctgcatatagaccttcgaatttgtggctcctccggttgcctgtattttcgtcatgggtatccctgtaccatccaagatttggaacatagccctggtctcacaggaaatgccctccagcattgcccgatacatatgaaaaacatttgtgctcacagacatacctgtaaaggttcccatacaggaatccacatctggaaagtaggtatttgataaatatggaagaaaaatcactccctgtgaattctctggacaacggtcatttaaaatatcatagaactttgaatctatccttcctttttccagaagagacggtgcaaagtttttcacaaaccagttgatacaattaccgttggcaaatctgcttaaccgtacgacgtattgtttgtcatctaaaaacggcgcagtttccaaatccgacaccgactgtagatcatccttggatatcacaaagtttagggcctccgtggagccctggcccaggaccatattcccacgctgggctgctccgcagccaatggtagcagctgtctgatcatgacagcccacaaatacttttatgtttcctggcaagcctaactgtgcagcaatttggggacgaatctttccaagacaggtgcctataggcacggcggggggcaaaagccccagatccacatggaattcatccgccagtgcctgatcccatacatgttcctttatattaaataccaaagaattggatgctgttgaataatccatggccccggcaccggagagcatataggtgacaaagctgtctatgaagaagagcttctttgcttttgaaaaggcctgcgggcattgttccttccaatactgatattgattcaccatggcgatcttcagattcgttttcccagttttttcatgtatttgagataaattcttattttccctgagcctgccccagatatccccattgcggctgtcaagataagtaagtccatcggagatcagaaggttgtccctttcatccaaaagtaccattgtctctcccagtgaggacaccattgccgcctgagcatcttgagaaaaaggtgcgatttccatcaagaccttttttacactttcccagatgagatcaatccgaaggtaggcccatcctggctgtgtatgatacaattcataagcacattttgccttttttagaatttttccttcctgggagatcaccactgccttacagcctgaagttccaacatcaattccaataaaatccatatgccctccattcaaccgccggccgcagtcttatgttaccaaaacatcccgctttcgctgctcttaccagctgtatttatcaatattgtcttttgtgagctgaatcagtccaaagtaaatcgttccgtcatcgttcacttctgcacggacgccttcaattccttcaatttcaatcacatcaccaggctcaaaggtctttccctgtaccagctcatttgccacataggatgcggtataggcaaggtaagcaggctctgttacccatgctgatttaaccgtaccgtcttcaatgtattgacggataacgtccggaagggtcaatcctgtgatatagatctgttccttttcaataattccctgctccactgcttcttctacagccgcagcagccgaatgaggttcataaccggaaattccaataatggcatccaggtccggataggacatgataagattttctgcgttgcggaatgccacctcactgtcatcctctgaccaaacctgtgtcacaagctccatgttgggataattttcttccatctcatcctggacaccttttaatctggcctgctggtttccggcagaaattccgccgcccataacagccaccttggcatcctcaccacattcttgtgccacttcctttacgaaatccctggcgcattcataatcagaactggaattcacatagtaggaacggtctgaatcctctgagtccgagtcaaaggtcactaccacaatgccctgttccactgctttattaatagaagcttcacagcctgccgcatcattggtggcaatgacaatggcatctggttttgccacaatggcatcctcaagcatgttgatctgttccgttgcatccgcagatgccggcccggacaccaccacattgatcccggttttttcaccgaaatccgtggcgcctgtcatacagtaaatattccatgccccggaaatttcctttggcataaaataaatggttgtgtcctcctggggtgctgctgctaaagctgtcgttacctgtgtcagcaccattgccataccgatggctgcagaacaaatttttttcattgacatttttgtttcctcctttttatgtgttttttattttatcttccctttgggaaagacaagttctttattcattctttttgctctttcctgcggactcataatttcctatcactacagaaaccagaatgatcaatcctaagatagcagattgataataggcactgatctgcacaaagttcattccgcttttcaggtaagcaattacaataattccaagaaaggttcccaaaagggttccttttccgcccttgatgctcacccctcccagaagacacatggtgatggcatcaaactcatatccggttcccagggaagcttcaatcccctgcattctggacagtatgatcactccagacagccctgcgatcactccgtttattgtaaacaacaggaacttataccgttctacattaattcctgagtactttgcggcacttgcattattaccaatggcccttagatccattcccactcttgtatactttaaaacaatggacacagccgccaccagcaggcacagcagcgcaaaggaatatggaaggaagcccaaaatacgtccgttaccaaaggaataaaaaccctcatcgggaaatcctctcatatttcctccggccttaaacacatagcaaagtccccgtacagcagtcattgtccccaaggttactatgaccggctgcattttcatttttgcgatcataattccgttgatcatgcctatgaccatgctcaccacgagggctgccgccactgccaaaggaatgggaacctgctgctgcataagtgtcccgcaggtatatgcggaaaagcacataaccgatcccacagacagatcaatatctccggtaagaatgatcagagtcattcccacactcagcagacctatttcagcaaatttcgccgttacgttggtaaaattgtccacagtggcgtaaacctgagattttactgagaacccagccagcatgatgataagtatgcctattaaaatcgcatatcttctcttgttataatcagcaaataattgttttatcccatttttcatcatagttctacctcggccccttctctttcgcaaactttcccaccaatctggtatttacctggaaatattggaaaataagggaaagcaggatcagcaaaccggtgatcgccgtgatccagtagtctgtggaacgggccagtatcatgccattgttgatgactgccatgatcatagcgccgatgaaaacacctcccaccgaacccttgcctccattcatgctcacgcctcccagaagaacaatggccagcagtgtattcacggtatccccgccaattttggaagccagaacactcttatacattccgcagtacagcagtgcagccacagagaccagcactccagaaaggatgtaggcctgctgcttgatacggtcagcatggatcccgcacatatccgcagcatcccggtttcctcccaccgcataaatatttcttccgaagcggcgcttggtgagcacgatccagataattaccgcgatcaccgtaaaccagaaaaacggccaggggagaatatcaccgattgtctcagaaccaaatttcaccaaaagatccgggaaaaaattgtagctcttttgacaaaacatcagggcaattcccctgatcagattctgtgcagccagggtaacgatcagatccggcaggtccacctttgtgaccaatagtcccatcagccctcctgtcagtgctccggtggccattaccaccacaatcgtcaccaataacggggctccgaaatcaaccagatgaccgatgatcacacactgcagggcaagattcgccccgatggacacgtcaatgcctcctgtgagaatgatcaaaaacagggcaattcccaaaatcccatttactgcagactgcttcataatgtttttcacattccaaaacatgaaaaaccggggagacatcaatgaaaatacaatgactaaaacaaccagaaatataagcgtggcaaattccttggatgagataaattttgccaatgcggcatttcctctcttacgtttcttttccaccattagtccctcccaccagaagcatatttcaatagtttgtcctggctaagctcctgggttctgtatgatctcccaatgtttcctttgtacatgatcagaacacggtctgtcattccaagaacctccggcgcctcagaggagacaagaatgatccccatttcctctgtatgtaccagctcatcaatcaattgatagatctctgcctttgctcccacgtccactcctcgggtgggctcgtttaaaataagcaccctgggatggatggaaagccatttggagagaaccaccttctgctggttgccgcctgacaacagggaggtatcctggtacatatcaactgcttttatagagagggagttcataaaatctttgcagacctttttgtttttctcccagtcaataaatatccctttcttataattcccgcagccaaccatggaaacattctcaaagatagaggtggcccctacaaatccatcctgttttctgtcaaagggtacataggcaaatcttttttccaccatctgcttcacattttttatatgaatttctttcccttccaaagtaattctgccttgggaaattttatggattccaaacaggctttctgccagctccagagtccctgatcctgccaggccataaattcccaggacttctgccttgtttaattcaaaagaaacattggaaaagccctttcctgtgagcccctgaacttttaaaagggactggctgctgccatttggggtatggatatagtactcatccagcttctttcccaccatcatattcaccatggtctctatggaagtgtcggccacatccaccacccccacatttgccccgttccgcagtaccgtaacccggtcacagataccttcaatctctaccatcttatgggatacatagatgatggtaacccctttctcattcagccttcgtatgaatttgaaaaaagtggctacctcattttccggcagagcggcagtgggctcatccataatgatcaactctgcgttcatggaaatggcctttgcgatctctaccatctgctgttcatggacactgagctgctctcccatcatatccacatcaatgtccacttccagtcccttcaggatttcttgggcatcctccttgatttttttccggtcaagaaaacccagcttggtcaaatattcttttctgttcagaaaaatattttctgccactgtcatattgggaaaaatattcagttcctggtgcatcatggcgatcccatcttttgcagactcgtcaatgctgttgtaatgaacctctctgcccttaaaaaaaatacttcctgaggttcttgagtaaaggcctgtaaggatcttaaggatcgtggattttcctgctccgttctctcctatcagccccatgatctcccctttttttacctccagacaggccttatccaaaacccgggcacctgggaagactttcacaatatccttcatctgaagaatatattcactcacacctgcccctccttcccgctgcctttctcctggcagccattcatgattcttcaggagccggaggcattccgcagttattacagaaatgctttagcatgaccatatcctctccggatctgttttcaattaagacaccctctgccgcccgcttctctgacacaaagaattcatcctttgtcatctggttcacccggatcacctggagagcttcacactccaagtctccgaacatgccgtgtccggtgagtaaaatacatccataggcagctttgtccttaataagcgccttctggcccggatggatggtcaattccttggcgccgatatagggattgccataggtgatccatttggatgtataagcctctgtctcctcctcaataacaggcatacggaaatatttctttctgtaaagaggctctgtatttgcctcccagtcaatcatatccatgataaaatcaatttcttcttttttgctcaggccttctggacagagattgtccatctcgcttttctcaaaagcaggataatgtctgtctgaataattctcaaatactgcataagattcgctcatccactgtggttcataggtacaccaggcaccgcagccatgaagcacgcctgcgggagtataccatccggtccctaactgaaggcggtaagctctggacaattccacaatccggttctcctctttgctgaacttttccagcctttccctgagctgttctttcgtaatggatggatcaattcccagataggtgatcacattttcattggctgcgctcatgttcatctggggaggataataatatgcctccggctttgtcactgcccccggcacgcagcaggactcttccttggggtgaagatggaaaaaggaggtagtggcatagtcataaaattttgagaacatgggccagcgtccatatttgttccacaactcacttccgatgagcgcctcccccagctgggcaacggcatctttaaaaagaatccgctctccgtcacaatctacatactgcagtcccagatcctcaggagcatccttcaccccatgaacaacaccggaagtagcgcaaaaccaacgttcctgtatcattcccagctctgttccataataggaataatcatctggatggagctttaatctgcgccccggcataaagctgtttcttggtatccagtcaggaaccagccgaaggatccctcctgttttctccagatacttatccaaaatttctttctgttgtgtcactgtaattcctccttttcgcatttttctttctgtttccagattatagaattttaatattgcaattttctgactactgtatctaaagtataacaccacacttttgacaaaaaaagccgcttaaatacctcttttttgtactattcatccaatattaaggtaaaatccggttataagaacaaagtgggcaaatccgcttcagttttccattccttcactccagtaaagcttgccagcattatgctccaatgcgcagctgggagcagcacttctatgtaacaaaaaaacagccataaagaaaatctgttttatcagaatctctttacggctgttttgggaatttacagctgtcctgctgcattcttcaaacatcttaccatttcatcaggggtttgtgtaagcttcagctcttcaatgatctttttattttccaacagcttataaagataattaaataagccgtcaaatttaaaggaatcccgtccctgtaaagccatcatgaagatgagacggaccttgctttcattgtcccaattgatcttatggggtaaaagtgccactacaatcttattttccagtacatatttttgaaatctatgagggatggcagtctcctgcccgatgtagctgctgcagacagcctcatcttttaacagttgccgctgaaaacaggaacagactgctcctgcctcctccaaaagggtacacatggcctccagggtctcctccttagtccatgtatttaaattcataaccaccaaattttcatccaggatctcctccagcagggccttggtcttctccttatctgcactgccccggagaagctcaaggcggctttgtatcaaggaaaggtcccgctcatcaaaatgcttggtgacttccaccagattttcatttttcatgagcatgggaatggtggagatcaccagatactcttccagaagctgggggttaaaatccagatagtgtatggtccgcacaatatttagttctggtatgtagctttccagtctggacttaaagtataaggccagtccttcatccgttccatgaacaagaacccccttcaccttattttcaccctcggcaatggaataatgaatggccaccgcaatgcgcgcgatctcgtcctcatcaaagaaaaagccatatttttctgccagctctgcaatatgtatcatcaccagcatatacaatgccgtcaggtcattggatacatccttatgaatctcgtttaagttaaatattttatatttttcccgcacataggtctgctcaaagtaaaagcatagaatatccagcagctcctccttgttggaaagattggataaattcgtggcctttccaatcttttccaaaaagcagcggatgtcctcccggcagaatcccttctcctcctcccagtcactgcggaaaaaggatacaaacatccgggcacataagaaaagagcttcctgtctgcgaaactggcagcttggacaaaataactttaaaatatcctccgctgccatcaaaaactgccggtaatgctcaatatctttctcattggccccatatctgctcaagtcaggttcctcattgatctctttgatcacccagccttgcttaatgcggtttacagtgacagcgatatgctcaatgagccgtacaaagtaaacatcggtaaataaaatccccagctttttctcggttcctctaagcacattttggatctcccacaccagctctctggtgtaggtgtgggacagatacgtgtaggccctcctgctcactctccggtccacatttggtgggactctgagaaattttgcccggcgggcatcccagtatctggcattgttgcaggatacaatggcctgccggatattggattcacttcctgtaaggaataccccttttttcctcacggaattcacagacagtcccatcctcaccaattcctggttaatctgccggatatcccttaggatcacatggcggctcacagacaattcatcagcaaacatctgtatggtataatcaatattgtaatttaaaagggtatcaataatgtaatccttgcggtactcataataatctgccttgctgtttgtctccttgttcagcagttcttccagccctcttctggcctgttcacttgccgctatgggaaaaattcctttctggggggaggaaaggagctcaatatccaggcttttcagttcctggcgcaaagctggcatccgtttcttaatactgcttaccgaaaagcccgtcatatctgaaattttctgggtggtggtcacaccgtcaatatttaataatactcgaaggatctcaacacttgtggtatccatataaggcctcctttttctgccatgtgccatgtgcagtgccattcatgaaagcctaaaatccatgaatattatacacattatagcacaaaagaggtctatcagcaatgaacctgaagcaacggccggattcggttactgttcccttcatacccagaaacacactttaccctgaaccgattctcataccaaatgtctttctaccagccgctttacaaactctgtggcgggagccgccaggatattctccggggaatcgtactgctccactcttccctgctccatgaccagcacctttgtacccagcttaagggcttcctgaatgtcatgggtcacgaacatgaccgtgatccctgtctgtgcgtagatccgtttcatctcattttgaagctgtcctctggtaatctcatccacggctccgaagggctcatccataagaagaagctccggggaggctgccagggccctggcgattcccaccctctgctgctggccgccggacaattcctggggataccgctccttcagcccttcctccagtcccacgattcccatccacttgctcactgcatcttttgtttttttcttattctttttgttcaggagattgggaacataggatatattctgttccacggtcatatgtggaaacaagacgctgccctgaatggcatagccgatgttccgtctcagctgaatcaaatctttatctttaatattttctccatttagaaagatatcccctgccgtaggcttcatcagaccattgatcattttcaaaatcgtagtttttccgcatccagaggagccgatgatggtgacgaactcccccttctccacagataaatgaaaaccgcttataaccttctggtctgggtattccttgctgatatcccgaaattcaattgctgtgctcattttaccaccccttgtcctataagtccagtctgttctagaaaatctctggccacatcttcaggctccctgccctgagattccacctggtcatttaatgcagccatatcctggtctgacaaaatccctgtgaccttctgaaaaatctcctttagctggggatattttttcagcacttccatccgtaccacgtttccacacaaataggagggatagaaattctggtcatccttcagaaccgtcacatccgactggctgagttgtccgtctgtggtaaatataatgatcacatccacctttttctggttcaccgcctgatattttaaaccgatatccagatccatggtttttccaaattccatatcataggcagcacacaaggcatcatacccgtcttctctttcgaaaaaatcatattctgccccaaaggtaagctcccctgccacggcgcttaggtccgaataggttttcaatccgtacttctgtgcgatctccttcctcactgccaggccgtaggtattgttaaatccatacataccggtccattccatttggtagttcttcttgtattcctcctgcatctggtcaaataaatcttctgtataaaggccctcttttttcaggaccatattccatccggtacctgtatattccgggtacaggtcgaattcccccttttccatggctggctggatattggaggttcctcctcccactccctgggtaagctccacctgcagatccgtgtcctgctctatgagaagcttcagcatatctcccaggatgtactgctctgtcatgggctttgtggcaatacgcagggtatctccacccctgttggcgaaaatcccggcgccaagggcagcgatacacaggacagccgtccctgcggccaggatccggttggtccttcgggctttcacactatgctgtttcattcggttttccagaaatcccagcaagaaatccaaaagaagggccagaagtgcgatgagcagacttcctgaaatggtcattgctgcattgttggtggtgatcccccggtaaatggccacccccagtcctccggcaccgataaaagaggcaatacccgccagggcgatggtcatggtgaccatactgcggattcccgacatgatcaccggcatggccaaaggaagcttgatcttatacaaaatctgcagccgtgtgcttcccattcccagcgctgcttcaataattcctgaatctacatttttcattcctgtatgggtgttgcgcaccatgggaagcagggcgtagattgtcagtgcgatcacagccgtcacattacccacaccggaaaacggtatgagaaatcccagcatggagatcgagggtatggtatataaaaaattaataacccccagggctggctttgccgttttctcatactcactgataagaattcccacaacaccacccagaatcaccgcgatacaaatggctgccattgagattcccagatgctccagcaaaagtcccaggaagaaatcctttctctgtgtgagcagttccaatatgtctttcaccatctctagtcctcttttctttctattgcctgcacaggacaggtttcataacaaagtccgcagtgaaggcaatgctcctgaacaatcccataaggagatccctccaaaatacactgctgggggcagacctccacacaggagccgcactggatacaatccgaatggataagaaatccttcttccctcttctgcgcctttccccaagggaaggactcccgatatacaggagttttccccagatcaaagaattctatctgtccctcttctatataaaatgcctccaggatataccggctttctccagggtatacccccttcatagaaggattgttctcaaagatccggtccatccattccctctgctcctgggccggaatttttttcacaggtccactgagtcttaccatttgataggctttattcatccctgtcactgccgtaaatccggaagctgtcagctgcgcataaaaatcctttcctctggctgtacagaaatacagccgctccttctccaccagcatcacatcaatgatgcgcacctggggtcttccctgggaatccacggtggcaaaggccacatccttgatctcccttaaaatattcaaacaatccatggtcttcataatatcccatcctttctcctattccactttctctttcctggtttccttctctcttatttagaataaaaaattctggttcttttttaaagtaggcacaatatagtgggatacctgctctttggaaactaagtatcgttaggatactattaaataccatatcctccatgccctggagctgctgaatcagatttccaatcaaaatttggatggacctgaaaataatggatttcaagggactttccttatcctggcattcatcattgaattccacccttacgccagtctcttttcttattatacagaaggcagtatctatacacaatagctgaaaaccagtacagaaaaaagatccttctgggaagcagtgaatttctttaaaatccgcggctcattcagaaggacccttttctggagtctttacaatcttttcctcttagattcccatagcagagactcttttattttcacaaaatccgggttgtacagttgtatattaagaatcaacagcatttttttatctcctgggaagggctcataaaagagccgggttttcataggttccggttctgcacagctttccttccctcatcatgatctcccctttggcaatgactgtatccagcttcagctctggggtgagcatcaccacatccccgtctgaacctgcctgtatacagcccttcttgggatacacctccagagctctggccacattggatgtgacataggtaagtgcctcctccagaggaagcccatacctgtgcaccagatcacagagctccagatacacggcatccatgctggaatagccgatggcctccaaatttcctgccttgtcgtatctggaccagcttccatgtccatccgagctgatggtgatgtgatccagaggaagtcccctctttttggcctccagaatacattccgaggcagagggctgtccaaccagcctgcaggtatagtccacatagccgcctttttcaaggaactgatagctttcctcaatgagccggggatttctgtttaaatgggtggggtggaaaatctttgcagggatggccgttcgttccagagcctcaaagacaggagcaagcccgctgggcgcatcccccatgtgaagctccatacagcctgcttttccactgagcattcccgccacccgggcatcgcttgccgcctggatgagctggtccacggtcacattgggcgccctgtggtcagagatcgccagcttcattccgatcacttcctggatcagggcaatatcccggtacacactgcctgccagcgtgggacttggaaacccataggacccggtgagcatataggccgtgactccctcttcgttgagagcctttgtcttggctagaagattttccacactgcgggtaagtccgtccgttcccagcagtcccacaatggtggtaatccctgcctggatcatctctgacatctgaagctccggggtgcgggtatggtagcttccctccccgccgcctccggtgatgtgcacatgcttgtcgatcagtccgggaaccagaagcttcccggtaccgtccagctcctggcaggaggaaggcagaggtcctatcttctcttccacaagctcgatctttccgccgcagaggagaacatccttcactcccataaaagcaggggtataaacctgaacatttttaattactatcataaattaagttttccttttattgttcttcttttttgatttttgcgatgccaaatcccgtgacagccaggataatggccataataatacctgtataattcaaaatggcccagggcagatattcgagggtaggcactcctaaggttgccgccatataggctccggccgcagaccagggaacaaggggaaccagcacggttccagagtcctccagggttctggacaggttcttggccgccagcccttttctcttaaaggcatcacggaagagctccccagggatcaggatggtcagataagagcttccggttgtgagagccactgtaaagcaggcggcaatggtggaacagaccagacccaccgtggatttgatcttggacaaaagcagctccagaaccttatccagcatcccggaaacactgatgatgcctgcaaagcccatggcacaaaataccagcaccgtggttcctgtcacagagataaccccgcctcggttgatcagccggatcacgtctgcagatgcctctccctggaagccggtcatggtgagatcaaagccggagatcagggctgaggtgccgtccaccaatgaaaagccctgataggcaacgcccaggatcacgcagataaagctggagatcaccatggttgggatggtgggccatttcaggaaggagcctgcgatgacaaggacaaagggtatcaaaattatgggattaaacttaaacatgctgctcagctgttccatcataacctgcacattgtccgcagtcacagttcctcccgtattggtgttcagtcccacgatcagatagacaatcagagatacaatggttgcagggatcgtggtgtaaagcatgtgggcaatatgctcatacagctcagctcctgccgccatgggagcaaggttggtggtgtcagacaagggggaaagcttgtctccaaaaaaggcaccggctaccactgccccggctgtagccggaagagacacacccagtccgcctgcaattcccatcatggcaacgccgatggttcccgctgccccccaggaggtacccgtcactacagagaggatggcagaaccaataaaggctgtcaccagcatgaatttaggattcaccagctggattccataataaatgatcataggaactgctccgcagaacatgagaccgccgatgagcagacccacggaccacaaaatcagggtggcaggcagacagtctgcgattttctgtaccactgcttcctggagctccttccaggaataccccagccgataggccataatacctgctgccaggcctgcaaggatgatcaggaactctgtcttcagtcccaggtacccatagcccactgccaggatcacaaacataaatacaattggcatcagggcctggccagtggtgggctttttcttttctcgttgcttcactttcatcttttcttcctccatttcagcactttaactcactgtatcgttattatactataaatggaagtaccaaaaaacttctttaatttgtctaaaatactggaattatatataaaacatcaataatctgctgggtcttcccgaatcataggtgctcttcattccagcgatacccgcataaccgctgctcattaatttctcaatggtacggtccatgtttcggaccgatacattgcagtactctgccatttccttagaggtaaaggtgtttttccgcatctgttccatcacctctttcatacgcaggagatatttcatgcccacaccgctttcctgggaaacagcctccaatttctcctgggccagaagattttccacctgagaattatcctggacacccatggggcccaccatttttgaagcatcataggccaggaatataacactttgttcatattttctggactgcttcatggcctgcaccgcattcttttttgcctcggacatggtactgccatagccgattcctacagaaaaacggttaaatatcttgctttttaaattctccagaagaaagaaatgggtatagttttttgtcacctccacaaggctctgctttcctgcaaacagataaatatgtccgttgctgccttccacaaccgccgcctctaatttcctggcaaacagatatacctgttccatgactttaatcttgtccataatctgctgatactcctgggtttccaaggcatcctcctgctcgtaggcagaaagcttcagacagatggctgcaatctccttaggcttggactgacgctccatgtaccttctctccagacggcggacagcgctgcggatggtatcaaaggttctttcgcttttaatgcagggaattccgtccctttccagaagacgggccacctcattgtgtgtggtgacacaaatatccgcctgattgctctgtacagcctgcttatgaaaatgatagatcatctgattgctctgataatcatcataggcttcccgcatgcctacgatctcctcctcttctttgtggatccccacctccagaagggcctcccttaccagcttcctggaataggtgtcaaaactcacccgctctatggaaaatcctctctgactcacctgaagcagggctgagatcacctctccttcatacctgggaaggatctcgtacagtatattttcatccagattatcttttgcaatataataagaaattaaaccagaaaataaaatcccgtcataatttttctgctggcggatcagctcatcacactccggatactcgctgtatataagaaaatcaaattccacggccggaaactcccgggcaatgtgctcaaatttttttacaaaggtgaggggacaaattacagcaattttcattgggacacactccttattgttaatctcccttgttaatttccctgggtatacacatccatagcctttccagtaattttgcaggtttccctttgaggcagccaatttccttggggctgccccagattttccgggaattcgaaagacagagacacctcacgacttcaggaaactccaatcccgtatttccagatttcccaggaatcctgaagacagagactctgtccattacagaaaagtgtataaatgtatttttttcatgaattatatcataatttgtcgctggtttgtacagactgcttaaatttcctgcaggaaagcttctattcctactctacaattgttccaccgccaataacaatatctccatcatataataccactgcctggccctttgtgattcccctctggggttcatcgaatttcacatacaggcggtcctccttctgaactgctgtggcccaggcttcgggatgctggtagcggatctttgccctacatcgtatggggtgatccagccggtccgctatgatcagattcacatcctctgccataagcgtatccctgtacaggctcctgctgtctcccacgatcaattgattcttttccaaattttttccaagcacatataccggctttcccagggataatcccagtccctttcgctgcccaactgtataccggatcaagcccttatgcaccccggctgtcctgccgtcctccagaaggatctttccctctggaaatgaatgtccgcagaaacgctctataaagcttccataatccccgtcaggtacgaagcagatatcttgactgtctcgcttcttggcattgacaaagccctgttcggccgcaattttccgaatctccgccttcgtaaagtctcccagcggaaaacgtgtgtgggcaagctgttcctgcgttaaactgtacagaacatagctttggtccttggaagcatccagggcttttttcaaaaggtatctcccactggtgctgtcatattgaattctggcgtaatggccagtaaccacataatcgtattgaagctcctgcattctttgaagaagcttttgaaatttcaaataccggttgcagtcaatacagggatttggagttccgccttcgatataagtatttacaaacctgcggatgaccatctcttcaaatttttcggtaaaattaaacacatagtgaggaattccaattttgtaagccacactcctggcatcctgtacatcctccaaggtacagcaggttttctcagcgcctgcgcctatctcttcattattgtataatttcatggtaattcctatacaggaaaatccactcttttttgtcatataagctgccaccccggaatcaacccctccgctcatggcgatcattgcccgctttttgctgttcatagtatatactcctattgtttttataggagtataatagctgatacatttctctccgtcaagaacattctataaatgggaaccttcctatataataaaagcagcttcggactgcgatatgccccttgtctactttagaggtatcatatcactcattaccattgtccgaagctgcttcttgattttttgtgtctgctctataccaaaaccaggtcgttttggacattttttcctgctgtcaatactgttccgtcaaagatcccggccgattttatctcagcaaaggcagattccctgtcagcttattgatcagtttcttggttccgcacaggccaagcccaaaataagtcacctggtcctctcccgcctgtctggccttttcaatatactcatcgtaagtcttgcagctctgcgccacatcagaaaaatctacagccacaacctctccaaaggcaggctcatacaatttttcccgaatttccttgatccgttccctgtccgccttcaaaatgggaaccggaaattcaatgattcccagatgcctccttccatcaccgtccgccacatccggacctaccgcctcaggaatatgttttccaagggtaatccccataatccctgccgtattggctataatccctaacggcagctcctcatcgatcaccattacacatttagcattctgtatatccatttcgttttctcccctttaaacctattttactctctgacaaaaacagccctgtcagtgtaagaatcatccctgcaagcatcaaagctgtcatcttctcatgaaggatcaccgcagaagtaaccgccgtaaccactggtacaatataaatgtaaacactggtctttacagaccccagcaccttcaccgcaaaattccaggtcacaaagcacatagccgaagcccccagccccaaaaacaatagattcaaaatatttctggtacgcagaagttccgaaggactcacctggaaatccataagaaacagcaccggaaccataaaaaccaatccataaaagaacactcttctggtggtctgaatggtatgtaatccaaaactgctgatcttcttggtaagggtggaataagctgcccagataacagccgccagcactgccaaaagatcccccaccggattaatttcaatggaaacctccgacggaaaactaagaaggccgatgccgatcatagccagcacaaatcccagaaaaaactggggactgggacgtttcccttttaaaaatatacagctgaagatcgctgtaaaaaacggtgcgatggatatgacaattcccacattggaagccaatgtataagtaagtgcgatattctcaaaaagataatacaaggtgaccccgcacaatcccgcagccgcaaaatacagctccttcttccggtccttcacagccagcctgtgaggaaaaatcagccataaagccccataccccatgagaaatcggataaacaaaatctcaatgggtgtaaaatcctccaaaagcaccttggtggatataaatgttgtcccccaaataagtattgtcacaagagcggccaaatgcccactcatttccttcttattttccactgcgctcctcctcttctgtcctgacattctgctgggtcttacttgaaaaaatattctgatactgcttaggtgtaagaccgataaactccttgaaaaaatttgtaaaatgactctgatctgaaaagcctgccgttatggctgcatccagcggtgaaattccctgctcaagaaacttcttcgctctgtccagccggacagtctgtaagtaccggtaaggagatacccccacctgtttcgtaaaagagcgcagcaaataggacttcccaaaatgagtcatggccaccagctcatccaatgaaatattttctccaaaatgctcctccatgtacctgcacagaacctggatctgctcattgggacggcagatttcttcctcctcaaagggctgtgcatgctccctgagcacctgttccagcaaaaaaaacagagcctcctctttctcaaatctggatctctgctccacgatcgcctcatataagtctcttatggaatgtgcaatatcactctgccttgccacattcaccgtaaacctgggaatataatcctccccggtaatctctctcactgcccttttcatcacctccgggttaatattcactgcccgatagtccagcacctccccgttaatgggtgcacaataatggttatccctgggattaaataaaatcatatctcctgcacttaaatcatattcctgattcctgcaccaaagatgccgcttacctccttctataaacccaattacataatagtcatgaaaatgattgggaaacttctgaacaatcccgctgagattataagcctctatctccagatcccggtcgtaatacacatgccgctgttcctgctcctgcagcatactcctctcctccttaaacactctttccaagtattttaacactgccacagagaaaagtcttgtaaaatattacaccagatttatttttataaaatattacaccaggtttatttttttaatattacaccaagattattttctgaaaaatttcactattttttctcatctgcatacactaaaagaaaactatctatggtgaataaatatggataacgaacttggcagcagacttgtacaacagggtaacatgatgcgcatagacaacgccttcattgaaaatgtctcctgctttaataattccagcggcagcctgctcctctcctactctgtgtcaggagaaggcggcactgattctatacaaactcttcgtctcaaccaaaatcggaacacggttatcctaaatccatttggtcagcgaatgtgtttctgctgcatacaaaaaggctcttgggtaaatgcggtgttttccagaagtatgaccaaaagcatccctcctgcggccactgctttttttattgcagttcaaagaaacccacagccatccaactggactacaattggacgaattacccacattgatttcaacaaccggattttatatacaaaagcccccaataatcctgacaaccagacaaaatttatcattggggatgaaactactttcaccaaccgctgcggcgctcctatccgctttagcgccctgaagcccggccagctggtacgtatcacccacgccaatttccaaacggccagcatcccgcctcagacaacggcctttcacgttcagattatataataaagacagttagattttgctgatttcacagcatagaaaataggccacacttgaaactgtgtggccattcatcagcacctgattttagatattttacttgtctacttgacaaggggcatatcaaaatcaccgatggtactgttaatatctttttaccgtaaacgccaaatagcaagtaccttgacatttttaggcggctgctttgcagccaccagtatttaagctttgcggatctctgccggaagtttttctgaccagggcagaagaggttctaaaaaggaacaatccctgtcatccatgtgtttcgggatctcttccaagagatactgcacataatcaaaaggtttcagattgttagcttttgcagtctccacaatgctgtaaatgattgcggaagtcttggctccattgattgtatcaatcatctgccaattcttcttcccaatacaaaaaccccggattgccctttcggatgcttatccttatatgaagataagcatccttatacgcaggatatttttatcctcatcttttcggaaaatacgcttaaatacagtagtcttgtcgtcaaagatgaggataacataattatctgattccgaaaatccttgctagttcgacttcgtcatctggccaaagtggttgtccggcgtttaactccggattgctgcggtccatggcggattttatcatctctaaggatggcttggcataaatccttgtagtctgagtggatgcatgtccgagaattcttgacaccagttcaagttccacatcactttgataaagatttgtggcccttgtcctgcgcaacatatggggataaactttagctggcagctccggatgctcggagcgtatcttttcggcgtacttgttaatgatccgctcaacattgcctggagacatcggatttgcctgattgtgaataaatgtataaaacagatactctgtagccggtgcatcctgattatgaaaaagatttatgtagtgcttcaggtgttttacagtaccttcagagatagatacaatacgttctttatccccttttccatgaatcctgagatatggggtagtgctttttaggtttacatctgattgctttagggccagcagttcgctcagtcttattgcggaatcgtacagcaatacaagaatggtggtatcacgtatctcaatcttgcggttgcccggagctgaaaggagagcttttaaacattcttctgataacagagctttttccttttctggatttttcagaaaaggaacacgggataccattagtgctgtctgctgttgggtaatgtcaccatcagcaacataccacatatacgactttatggccgccaaacgctgattacaagaagatttttcataaccctctttctgcagatgctccataaatccgagaagaaagtctctcgtgcagtcctgaaaatcaaatgtcttaagggaaaacccctgcaccgaaatgtatctacgaaatacagtcagtgcatctcggtacgcttttactgtgtgagggctgcggctacattgctttgtgagatactcatcgagaaaatcccttgttttggagaaaaacagcttttcaaaatctttattcttcatgctgcacctccggaatcacacgggatgttatggtgtctttacgccggactgtattaaaagcatcctgaaccaaatggtaataataatacgattccattggccctttgtgcccaagatagctgctgagataaggcatcatcatccggagactggtgtctgactccatccagaggtttatcctcttaattacaaaggcatgtcgcaggcaatgcacagttggctttttatcgcacttccgagaagtttgtgtggagttccagaactcgttaaactttcggtcaacagatgttttcgggatacatttatccggatatttgccagggaagaaccatccatatgtatctgacagttctttcttcaaccattgtttgtattcggtgcataactgacatacatcatcagagaggtaaatgatacggtccttgtttccctttgagtgaataattgtcagtgttccgctatcggtgttcacatctgtcagccttaaggcacaggcctcgttgttccggaggccacaacagtatattaatcggaacaacactttatattcggttgcaagacgctcaaaagcttttaccggggcagcggattcgtataggtcaacctgtttaaagaattccctgatatcctcgtcagacatcaggtatggaactgttttctctggtcttggaagctgtgtcggtatgtagctcggtatgccaatggcattcagatgaatgcagaaacatctgagtgcctgtaatcggtttgattgggttgtttttgattcgcttaattgttttgcagaccatgaatcatagagttcctttgttatttcgatcttatctatttgcctggctttgcaaaactggtcaaagcggaataaccagtacgcaggattgtcaaacataaaaccggcttccctacgggactgaatataaacactgattaaatcggcaaatatactggaataatggaaatccttatgcatggaagacacctccttgtaaagagatgccaattgcatccagtgatatagggcactgccgcatccgttcctcatcaagtgaaagatatttatacacggtactgtccgtactatgtccgagcgagtcagcaataagctcagctttcgtattgcctcttaacaggtttgttgcaaatgttttccgaagcacatggaaaccatccctgtaagtatccgcctgaggccgaaaccgttttaaggcttttgcacatacgcagcggtgaagccctttgaaaggtgttttgtgcttgataaatacatgtgcgtcggcactttccggtctgccatcacgaagatatctgaacaaaatgttgccggttttcacaggcatcggcagtgcgatgtttttgcctgttttctcctgtgtcagacatatgctccgtctcttccagtcgatattttcaaaacgaagagagacgatgtcaatggctctgaaacccatggtgagtccgacacatacaatggcataatcccgcagtcccacaggtgaaagcgtatcaatatcgacagaccatatataagccatatcctctgtagacaatgtctgcacaatgactgtgtgtggagctgacatagtcggaagggctttatgcagatatggattgcagatcatgccttgttcataaagatatataaggaaacatcttattctgcagttataagctgctttgccctcaggcgtcgtatgtatatccttacggttaaaattctgcaaagtgtccgtagtgatttcgccaaaattatttatcccgtctttttgcagatattgacagaatcggatacaacaggaacggtgcatggttatggttgattttttccatccctcacgctcaagcagggcaagataggaatgaatgctgtcactcgcccaggcagggagtctgtcaaccgggggaacataagacgggtcacccgtatagctggtagtaataatgccagttttcagatagtgtaggaactgacataaactgcgcctgtgctgtttccatccagcacctaagaaaggctttacatgttcaaaccataaccacaggttttcttcggtcctgctgaaagtatgcatatctaggaaaatatagtaaagtgtcaggatgtgttttgtacttttgaggacggtgtccttataacgggtattagccatttcctgaagaaatctctctataatcgaccatgaaataaccggaaatacagttggggttgttcccgacaatccggcatcaggaatctccactatctgatggattagcagcttgttaagggcaagcgaaaaccccagagagcatttccctcgatcagaactataccttaaaaacacccgtatcaaatcttcataaacatctttggagatggaagatttgtggtaatcatccttatgaaaattcagcaacctagaataatctagctggctaatgctttggagtcccttgttttgcaggtacaataaaaaccttgcgcaggtgatgcggtaacggtcatcatcaggagtgatcaatccgttgtccagaaaatcatccagttcagctttcaatgtttctgacagcaggcagtaggctgagccccttgcacccaagtgattaggtaatatgagcccattggcatatacatcttccagctggtcaacgcaatgcttccagccagtatgctgccgataggtccagcaagctttgttgtcatcaatccatcgatatgcggtatctgaagaataaagtattttttcttcagtcagatgttttcgcaatgccttatagcagagccgatgcagacttatcacagatgcactaaagttctctgcgacaagaaattcaaggatgacagttacatttttgtcgtattgttccatgtggaatcacctccataaatttgatgattccattatcagggataaggtggattgttatccacatcttttattgaacaatgccttgatttattctatatcgggcaaaagatgaggataaaaatatcctgcgtataaggatgcgttattatcaatcggaacgtctccatctgtgagaaatacacggagatatttttcttggttcagcgcataaccgacagcatcaccaaatttatcctttttggatacttttatggttttcaggtacgcaaaaaacgcatccacaagcggtttgataaccacctgccgctgcttaagccgttcatcagaagaaaaagcattcagtttcccttcttcccggtagattgcctggatctgcttcatcagcagaaatgccttggattccttttgatatgatttagggagcagcttcaaagcttcatcaaatctgcgccggcaatgcacccagcatcccgcaatggtcagttcttccagttctttttctaaagtatggtagacctgataaccgtctgttacacagataccatcataacctttcagaaattcccgcggatgagatgcatttctcgtctgttggtattcatacaggacaatctgcctgttttgatacagatgcccggaacggtatacccacatccagcttttggaacctgctttccttccgtcatgattcacaagcaccggtgtttcatctgcctggatcacatgataggaatacaattctttatgaagataaccataaaggaccgatagatattcctctgctaaacgtatgcaccagtttgccatgttctgccttgtgatctggagtccataacgctggaattcccgttccagccggtagagcggtactgcattcacatactttccattaatgattgcagctgccagtgatggcgataccaggcttccatgcagcaaggtctttggatggtctgctttgaccatatgttcatctgttttgctggcatatactccgatgtgatgttcttccacttctaccttagcaggtacgaaatgatattttctggaaatggcatccggtaactgtttccaaccattggcaccgaattctgcttccaattctgccttggatagataatggtcaatccgtcttaccgggagccctgaaagatcagcctctttcttgcccttgcgctttggctgctttggagacttcagttccaaatcttcaggttctgcggcagtaagatcgcagacggcttctgcttcattgaaaaatacgatggttccttctacctcaaggaaacaaatctggtttgtgtcttccatcttttctgaagacctgccaaaacggctctgcttaccaaggatcacctgttccatcagaagctgcattttttcgttcgatgcatgaagttccctggttaaggcattcagctgttcctgctgttgtaaaagaagctggataagaaacgacttatcaacgctatttaattgttcctccgtataattgactgccataactgaacctctcttttctgagtggtattatagcagaatcaacggctttttgctatttttgaattctgtcaccttcgtcattttgacggtggataacagtcatgaatacctgagaataaaagcctcaaattcagatatttatgactgttatccacaatctgaaaagtttttaatcatgggtattatagaaaactttcagaatgtgaataactttaaattttatattgcacaggataatcagacatggatgaagaacattttattttctacgttttgcacaattcacaaggagaacgatggatccgcaacatcttcaatgggatgtctggcaacgatctctaacccctgcatcaacatttgatactggtctgtagtgatctccaaggcttcctcttttgtacggggccatcggaagttcccgttttcaatccgcttgtacagaagaagaaatccgtccccttcccagatgagtccttttattcgatccgtacgtttgccacaaaataagaataatgtattcttatcgtaaggatcgagctggaactgaaaacgtaggatcctggctaaaccgtcaatccctctgcgcagatccgtaaatccagttgccaggtacacttttttgaatccggtgccatcattgagcattcccaatcactcccaaaagtgtatgtagaaacgaggcagatgcctgatcggtaatttccaaagtgagattgttcccgcatctgattacagcagcgattttatgctccgatgccatagtttccggatggattgcagaggaaggaacttgtacaaaggcttgtgtaggatctgcaacttccaggtatgcctcacggactttccggagtctccagtaataactcgcttttgtaatgtcatgtaactgacaccattcatcgatcttcattccctgtggacgattttggcagtctctgaccagttcagcccattcgctcaaacgggtttgctgtgcaactaaacttgtgtgagatttcatgacttacctcctgtagcaaagtctaaaaagttgagcactaaactttttggactttatagtgatgagtctattatctcacataggatgattttgaaaaggtacttgctatttggcgtttactttttaccattttcccataattcaaaaagacagatagactccttcctaaaggggttttataaaatttcgtccattatatttcagaagtacctctttcttccggttcaatgatacttccgtatatatttgagttgtaacaatactattatgtcccagcagctcctgcacatcccggatactggccccattatttaaaagctgagttgcaaagctgtgacgcagatagtgcggtgtagatttgggattaatatttgacaaatctctatatttataatatacattctcaatgctgtaaatggacatcctctttccagctttattaacaaacaaagcagaatcctccggattcaattccctgcggactaccagccaatgattcagcttctgacaaacgatgggggaggatatgaaaagcatccgttccttgttccccttcccatgcaccagtacagagcattctccccggttataatcctccacatcaagcatagcaacctctccgatccgaagtcccagacaaaaaagcatttctatgatacacatatttcgaatacacagccgcctgtgataatcagaggacacctgctggaactccaatgacactgaggaaattaaattcttgatttcctcccgggataaagtcttaggcagatttttcggaatttgatattttcgagaggaaaatcgaaaaaacctctctcccggactgtatcgaaaacttaaatagttacagtattgatgaatggacacgtatttccgtttaatagaccgggggctcagctcaatttcatcttgaagatataaaaaataagcaagaatcgtattctgatccatacaaacacattttctcataacaaaccagtcaatcatatttgaaatatcacactgatacgcatataacgtcttcttccccaaatttctttccacggccagaatatgtagaaattctttcgtaatttccttttgttgattatagttaaatctcatttgctcacctctaagaatatttttttgtattcataatccccctttttgccaaaagagttacatggagaacggatatttaaagttgtgattttcattggatttccttctgtttcaactatttatgtatttagtatttttaatgatgtagacagataattttcttcaagaattactctgggatggactgagatttcatgaaatgggaaatatcttgtggatgtattgtttttttaatttcattaattctttttttattctgattatagcattgtttattcagattatccagtcgatatatgaagtattttgacaggaataataacaattatttgatccccatgggtatgtagttgtaagcagttccctttaattgctcagaactaaatatccataggcagtccacatggaggaagaaagacacttatgaaaaagaaaagagcactggaacactggcaggtcatcgccctgtatttagtcctatatgatgtcatcaccgtcaccgcggcctatttctccggcctgtggctccggttcgactgcaggtattccagcatccccccggaatacctgaacgccttctttgaatttatcccctggcacactgccttcacggtactggtgtactggtatctgcggctgtataagagcgtatggcggttcgccagctattccgagctgatccgcatcagcatggccaatgtgatcaccgccctgttccacacggccgggatcaccctgctctttcgccggatgcctgtctcctattacctaatcggcccggtggtgcagttcatcctgggggtgttcatccgcttctcctaccggttcatcctgatggagcgcagccggcagcagagctctgccagggacaagaccgcccggcgggtgatggtcatcggtgcgggcgcggccgggcagaccatcctgcgggagatgctccattccgccgagacccagatgcggccctgctgcatcatcgatgacaactccaacaaatggggccggtacatagacggcgtccccatcgtgggaggccgggaggacatcctgcggggggtggaaaaatacggcatcgaccagatcctgttcgtgatccccacagcggacgcaaaggagaaaagggacatcctgaacatctgcaaggagaccgggtgcgagctgaaggtgatgccgggcctgtaccagctggtgaacggggaggtggccctgagcaagatgaagaaggtggccgtggaggacctgctgggccgggagcccatcaaggtggacatggatgagatcttccgccacatcagcgggaagaccatcctggtgaccgggggcgggggctccatcggcagcgagctctgccgccagatcgccgggcatgggcccgcaaggctggtgatcttcgacatctatgagaacaacgcctatgacatccagcaggagctgaaggcctcctatccggatctgaacctgaccgtgctcatcggctccgtgcgcaataccagcaggatcaaccgggtgttcgagacctaccgcccggacatcgtgtaccacgcagcggcacataagcacgtgccccttatggaggccagcccctgcgaggccgtgaagaacaacgtgatcggcacctacaagaccgcctgcgccgccctggccaatggctgcggccggttcgtgctgatcagcacggacaaggcggtgaaccccaccaacatcatgggggccagcaagcgcctgtgcgagatggtcatccagagcatggaccaggtgagccgcaccgggcgggaggacctgctcccgctgctgccgcccggggaagggcggggaacccctgtattcacaggcccgcccggcagcccatacggcagggatcgttccggcaaaaaggcccggacagagtttgtggccgtacggttcgggaatgtgctgggcagcaacggctcggtgatccccctgttccggaagcagatcgaaaaaggcggcccggtgacggtgacccacccggacatcatccggtacttcatgaccatcccggaggcggtgagcctggtgctgcaggcgggggcctatgccaggggcggcgagatcttcgtcctggatatgggtgagcccgtgaagatcgacacccttgcccggaatctgatcaagctgtccggctacaagccggacgaggacataaggatcgtgtacacgggcctgcggcccggggagaagctttatgaagagaagctcatggaggaggaagggatgaggaagacccccaaccagctcatccatatcgggcagccaattcctatggatatcggggatttcttccggaagctggaggtcctggatgcatacagccgggcggaaagcccggagatcgtgcggatcgtggcggagatcgtgcctacgtatcatccggatgacaggtcagatgggggtgtggcggagatccgggaagggcttagcgaagtggctgctgcagatgaggaagaggttgtacggggggcttagtatgctaaaggacaaggaatctcatgaagtgaagcgccccattagattatatcaatgtttattacggagcatcatcgactagataaattgagaaggactactaggactatctagtctaattatgcacgttcctgaactggcctatatgatcaaggattttgagactaattaatatgtacagtttacgcaaatcttttatctgtggagaagactctggagaataaaagtagtatcaattacgccatgtactcttcgccgaaaagcacatgaaaatggcggatacgcggatatatggcagtgctgagcttggcaaagatgtattccttacgtaagacaatgcgcttttttaccacaaccattgtagacatacggtggttttttagtttttcgcatttaccagtttcgtagtatggcatacatcgatacaacgtatatcaggtttcttgcggattttgcagagagcaccacactgttcatcacaaaggcaaactattttacaagttttacgatgaatacacggtgggtttgtatatcctgcatcaggccgctctttttaatatccacacggataagtatagacacatgataaccacaagggagtaaaagagacatgtttatacttgagaatcataatttgaaaccaagccctagtaaaatctggcttgccagtccgacgatgcacgggccggaactggagtatgtgagaaaagcttacgagacgaattacagaaagccggatatatcacacggagcagtagaaggtaagcgggtgttctgctcggatattacctttgatgccacgctgaatcctgtggtctatgagggcggccattccggtgtttatcgacacaggcccgaagacatggaatatggatccggtggctcttaagagagcttttgaaatctacccggatgtgaagctcgtagtgatggcacatctctacggctttccggaggatattgtaaggataccagagatttgcgacaggcacgaggcactgatcattgaggacgcagcggagtccatggatgcgacgatagagattgttgaggatggcgtaaccgtggcgaagcagaccaaggttgcccggcaaaccggctccttcggggattacgcaacaatctcttacaacggcaacaacgtttacaagaccgaatggcttgcaaaaaaacaacaaaatattgtggaaaaaacggcatgaaaagcctcgaattttggctgtcctgccgcttttcgctatgtaaataacatgctatttgaccaccggaagtcctagtaatgagttatccatcaggatatgtaaagattcatcttaaagagtccgtttggatgagagaaatgtacgctacatcccaaagagggacatatggatgaaaatgggtgtaaaagcacatggaagagatttgttggtattgagatatgttgaaaagtgattggaagatggtatatatcatttttttagtattgcaacggctttggcggttaatagtttgaatattagataaaggatatgttggagaatggacaagaacttaattttgcaggatccgcaatttccgggatttaagcagtttgagaaaagggtgtcttgatgttgagataatagggaccaggggaatttgtggaaaaaacggaaaaaaggatgtttggtagctaatgggacatcgttttccttaagaagatacctctttcactgctcatagtgcatggaaagaaaaatagatagaaatgagatgtgtggatgtccgcacggatgatattaatgccacaggagagaaaatatgtttatacctgaaaatcatagcataaaacccagttccggcaaagtctggctcgccagtccgactatgcatggtactgagctagaatacatgaaagaggcctacgacacgaactggatgagcacagtgggcaaaaatatcaatgaagtcgagcgtatctcggctgagaaagccagtgtgaaatatgcggtcgctctgtcctgctgcacagcagcgcttcatctctgtgtaaaactggctggggagagactctacggcaagccagatatttcccacggagcagtggaaggcaagcgggtgttctgctccgacatgacctttgacgcaacacttaaccctgtggtctatgagggcggcatcccggtgtttattgatacggatgcaaagacttggaacatggatccggcagcacttgagagggcgtttgaaatctacccggatgtgaaactcgtggtgatggcgcatctgtatggctttccgggcgatatcgttaaaataaggaagatttgtgataagcacggggcactgattatcgaggatgcggcggagtctatgggcgcgacgatagatattgtggaagatggagttactgtggcgaagcaagccggctctttcggtgattatggagctatatcttataacggtaataaaattatcacgggttctgccggcggttgtctgttgacaaattctttagaggatgcgaacagagccaggaaatggtccacacagagccgcgagaatgcgccctggtaccagcatgaagaggtcggctacaactaccgcatgagcaatgtgattgccggcgtcatccgtgggcagtacgagtatctggaagagcatatcgagcagaaaaagagaatttacgagcggtataaagatggattcaaagacttgcccgtgaccatgaacccgattatggaggggagcacgccaagttactggcttagctgtctgttgattgatgaagacgatatgtgcaggcaggtacggtctgataataaagtgctgtatcagccggagcatgggaaaagctgccccacagagattttggagaggattacggaatataacgcagaaggccgtccaatctggaagccgatgcacatgcagccgatgtaccggaaccatgcgtttatcacagtggatggcagcggcagatgccggacgaatgcgtacatagagggcggatgtatggatgtcggtacggatatctttaacagagggctgtgccttccgtctgataataagatgacagatgagcaacaagatatggttattgagattgttagagggtgttttgagtagatatgtggttgatggagtagatagatggataaaaagaaattagcaatagtcgcggctgtaggaactgtggcgggtgttgcgggatatcagtttggaaaatctgtgaaaaagaaaaaagctcaaaattcccagaaaggatcccccttgactcctcgcaagaagggattctatgagaaatacataaaacgtcctttggatatcatctgtgcgttattagccatcatatgtttctgttggttatacgccattatagcggttcttgttcgcatcaagctcgggtcaccaatacttttcaagcaggtgcggccagggatgaatgagaaaatatttccactctacaaattccgcactatgacggaagagcgagatgagaaaggcgaactgcttccagatggagtgaggatcacaaaattcggaaagtggctacgtagcaccagccttgacgaactgccggaggcattaaatatcttgagtggaaccatgagcgtcataggtccgagaccacagcttgttagagatatggtctttatgacggacgatcaaaggagaagacacagtgtccgtccaggtttaagcggattggcgcagatcaacggcaggaatggcatcagttgggaacagaagctcgattgggatttgaaatatatagagaaaattacatttcttggtgatgtgaagataatcattgacacggttggaaaagcctttgtgaagaaggaaggtattaaccgggaagggacagcttctgacatggattttggagattggctacttagtgaaggtaagatcaaccaagtagagtatgacgagaaaaagaagatagcaaaggaattgttggaaggagcaattacataagttatggattttggcaatggaataaataaatggaaatattataatcacgcaatgattccaacaacagcaccgcatgaatttccagatctacaaccgataacagatggcaccatttggaaaatcgggggggggggtattccactgttagcgaggtggacttctgattttgactgtggttatgagacaaattggtggtactgcataaaaaacacaccgctgaatatcgatgctttgaagagtaagaggcgatatgaaatcaacaaggggaaaaagaattttgacgtccggctaattgatccgggtgaatatgtggaagatatcatagctatccaaaaagcagcttgggatacatatccggaatcataccggcctgtttcaaatccggagaggcttagaaaagaaatcgttaattggagacagtttagggtatttggtgcttttagcacacaggataaaaagatgcatgcctatgcatatttgaaagagcacgatcgatgggcaaatttttcagtgttaaaggctgatccacaatatgaaaaatatgccgtgaatgctgcaatggtggctggcatttgcgatttatatgccaataggttaggaaaagatttttatatctgtgatggtgaaagaaatactgtccatgagacatcttttcaggattacctgataaagtattttgatttccggcgagcatattgcaaactaaacttggtttatcgaaaaccatgtgggttgtttgtaaatgtgatgtatccatttaagaagaacattgagaaggggaaggataaatcattttggaatagagtaaatgctattttatctatggaacaattgagcagggctgataatggaattaatgctgtaaatagaatgagaggataaagcttatatatgacggtatattctgatgaccactaaggaggggaagcattttggaagaattagtaactataataacaccgtcatataatacggcttcatacatagaagagacgattaggagtgtgttgcatcagttttatcgaaattgggaattgataattgtggatgattgttcaacagataatactgatgaagttgttcagcaattcctcagtgatgagcgtgtccactatctcaagaatgagagtaacagcgggtggcagtatcccgtaatagggcactgcgagaggcaaagggaaaatggattgcctttcttgattcgtatgatctttggatgccggataaactggaaaagcatgttcggttcctgaaaaaaaggttacgcattttcatataccgaatatgaagaaatagacgagcaaggaaagctgttgggagtcaaggctttcggctcaaagaaaattacgaaaataagaatgtttgcgtattgctggccgggttgtttaactgtgatgtacgatagggagactgttggtgaaattcagataaaggacataaggaaaaataatgactacgtcatgtggcttatggtttgtaaaaagacaggttgctatttgttgccagagttgcttgctaagtatcgtaaaagaagtggaagcatcagctggttaagttatacaaaactgatgaaatggcagtatagactttggcgtgaagcagaaggaaaaaatgtaatttatgcttctgtgattacaggattaaatctcttatttggactgtataagaaattactgtttgtggaaagaggaaaagatatgagacatcaaaaatcaatcggggaggggtataacctaaataccttcagctatagaggtgctctttatgcagcatgatttggtttctattatcatgcctgcatataattcagcaaaatatattgctgagtcaattgaaagtgttcaggcacaaacatacaaaaaatgggagttgttaattgttgatgattgttcaaaagatagcactgttaaaataattcaagaatatgctgctatggacagccgtattcggctattgtcaaataaaaagaacagcggtgcagcgatttccagaaacaatgcgctccgtgaagcaaaaggcagatggattgcttttttagatagtgatgatgtatggttttcacaaaaactggaaaaacagattgatttcatgatctctcatggttacaagttcacctatacggattataggattcggctgaatgacgaatggatgccgtatattaatacgggtcccaaggttgtcacaaaagtaaagctctattgctattgttacttttctacgattactgtcatgtatgatcgtgagcatattggattgattcagattgcagatttgaaaaaaaataacgattacgcaatgtggtttcaagcgattgagaaatctccgtgctaccgtcttccggaatgcctgtcttattattataaacacgataactctatctcgagtggaagcaaaataaaattgattaaataccactatattatgtaccgtaaagctttgaagaaaggaaagtttgtgtcagtcctattgactgcaaataatcttttttggggtgtcataaagaaaatttcatataaagagaggttcagcgagaatgaaaacactttatgaaaaaattgtagcgaaggaagaaagtatttccctggtgggtttgggatatgtaggtatgccgattgcagttgcttttgcaaagaaggttaatgttatcggctttgatttgaatgctgcaaagattgaactgtataaatcgggtatagatccgactcatgaggttggagacgaagccattaaagctacaacggttgagtttactgctgatgaaaaggatttgcagaaagccaaattccacatcgtagccgttcctacaccggtcaaccaggatcatacgccggatttatccccggttgagggagcaagcaccatcctcggaagaaatctcacaaaaggttctattgttgtatttgaatctacagtttatccgggggttacagaggatgtttgtgtaccgattttggaaagggaatctggattaaaatgcggggtagattttaagattggctattcaccagaacgtatcaatccgggagataaggttcaccggttggagaacatacgaaagattgtatctggtatggacgaggaatccctgcaggagatcaaaaatgtgtatgaccttgttatagaggttggtacataccctgtatcctccatcaaaacagcagaagctgttaaggttgtagagaacagtcagcgtgatattaatatcgctttcatgaatgaactggcaatggtgtttgaccgaatgggaattgacaccaacgaggtcgttgatggtatgaacaccaaatggaatgcgcttggattccgtccaggtcttgtcggtggacattgcatcggcgtggatccatactactttacatatgaagcagaaaagcttggctaccacagtcagattattttgaacggcagaatagtcaacgatagtatgggagcattcgtggcggatgcaacaataaagcagatgattaaagccggaatcgctccaaagaaaagtaaggtaataattctcggcttgacatttaaagagaactgtcctgatacaagaaacagcaaggtagaggatatcataaatcgtcttgctgaatacgatatcaaacctgttgttatcgatccctgggcaaacctggcagatgcaaagcgagagtacaatgtggaaatcaagccgatggatgaagcaaaggatgcagactgtgtaatattggcggtcgctcacaatgagttcaaagaactgacttgggaacagatagcaacaatgtacaagacagatacacctatgaatgagatggttctcattgatgtaaaggggcttagaaacagatacgaggccgtagaacaaggatatagttattggagattgtaaggtatcgatcagatgaggattacatctctattgcttgcgacaaagatatttttgaagagccggataaatacttttttgcttgatactgagaagtttattaggggaacaaaatatgcgtgtgctacacattaatagaaattacatatcatcaccacttcaccagaccatgatagagcacttggatgcttttgtgtccgaaaatattgttttggccccatctgaaaaagatgaggtaatgagaatttcgccaaacaaaaatgtgatagtatcgaggtgcttttccaagtgtgatcggtatgtattcgatttaaagcaatttaagattataagatcggttcagaaatccgtggatgtcggctgctttgatataattcacgcatacacgctttttacagatggaaattgtgcgatgaagttgtcacagaaatacaatgtaccctacgtggttgctatacgcaatactgatgtgaatgacttttttcgcaggttgccgtttttacgaaaacgtggaatacagattatggaacaagcatctgcaatatttttcctctcacaatcatatcagaatgaggtaatgtcgagatatgtaccaaagagattgcgagacaagtttttgaaaaaatcttttttaatcccaaatgggatagatgatttttggattaagaatactgtttcccatattgatgaatctcatttggagcggattaagcaaaaccatataaaccttatctatgctgggcggatagataaaaataaaaacattccaataacaataaaggccatagagatgttgtgtgataaaggctggacaattaaacttactgttgtagggcgtgtagaggatcaagaagaatttaatagtattgtgaaatctccctttgtagagtaccatccggcctgtggcaaagaacaactgatacaattgtatagggagaatgacatatttgtgatgccttcattcacagaaacatttggtcttgtttatgtggaggcgatgagtcagggattacctgtgatttacacgatagggcagggattcgacgggcagtttacagagggagaggttggctttcgtgttaatcctattaataaaaacgatataacaaaaaaagttacatcaatatgcaaaaactatatggctatgtcatccaactgctaccgctccgttaaaaaatatcaatgggatttgatttcaagaaagtatatgcacatatatcgaggtattttaaatgacaagatggacattagataatagtatattttcattttgtataggtgagcataaattggcattttgtgatagttggagttacatacgctttggaaaatatcatgtcgaagtcagcaggagaaccaaaacaggctattataaggtaaataataacgaaatattaatcataggtgtatgcattgatacttcttctgatggaataacgaatacgtgtgaaaaaatcattagtaatgctaaatgtatatcggatgtcctggaaatagaagaagatatgggcggaaaatatattatttttataaagctcgaagatgaatactatcttgtgggtgatgcaacgtgtagtttgccaatagcatatacattctttcagggctgtttcttcgctacttcttatgaaaaaattctagcggacaagttgggagtcgtttctgacattgaattagaacgaattcaaaacggtggaagtatctcccaagcaatgccttatgacataactgtttataaagagattaaacagttattgccaaatcattatattgatattaattgcaaaagggcaattcgttttgctttactgcccgaacaagtgaaaaatcttagtgcatctgatgcggcagaaatgacacataaaagaataataaaattagtatggggatattctaaactatttaaaatagcctgcccaattacatcggggcgtgacagcagagttgtcctttcatattttcactcacaagataatggagtgcagtgctatactattaaacacacagaattcaaagagaaggaacaagatatagttattcctgaattgttggcagagaaatatagactgaatcatagtgtgtttattgatatggagcctgaaccagcactgagagagtatgctaacgaagtatttggtaaggggagatatagtttaaggactttaatgattgcgaatacaatttataataatttctttgactttgcaatcatgaacggagatattatcggacaaattggaaagtgttctctccatcgagatataccagctatatttgcaacaccaaggtattttcggtgtaaattgcataactatagcgctcaatctaaattcttattaaaaagatggaaaggagaaattatggcatcaaatgagagaaccaatttatttgatatgttttcaattgagagtagaatgggtagatgggctgcaaaagaaaagaatatttataacgcattaggacaaacggacctaaacatttttaactctagaagcatacttcaaatttggtgttctgtttcgcgtaaagataggaaggaatcaaagatacatttggaactgataaagcgtacagagagtggacttttaagtattccttttgagaaagaaaataatatatttgcgcgtatttccaagtgcaatggaatgttctatctaattggatcgtactgcaaatattttttaggctggataaaatatagatgcggagggaaagtatgaaagaagttattattactgcagacgattacggtatgtctaagtcagtaaatactgcaattgaggaaggaattgaagtggggcttataacatccactaatgttatgataaatatgccattttcagatgaggcagtgaaattaaaaagtatttctaatgatgtttctgtgggtatccactggacattgagttgcggaaagcctgtgtcagactctagaagaattagaagcttggtagatgctgctgggaattttttttcatactcggattttcgtaatagactcagaaaaggtcaaataaaaaaagaagaggtttgcacagaactcacttctcagtatgagaaatataaagcattacttggggttcctgattattggaattcacaccagaacgtacatgtggattttggaatctataattggtttgtagataccgctctaaagttgggcggggggggggagaatgagaagtcaccagaggatatatgtaccagcctctgacggcatatgttcaatgaatcaattctggcgtatcatagaaccgttaaaatcagttattttaaatttctggcagaatacggcgcataaaaaagggactgcgtcacctgagggattaatagtatgtttaaatgggcaagatgtatttaatccggaatatgtttttaataatattcagtggaagaataagtctattgcggaatatgttatccatcctgctacagaaaatgactccccatatttggggaatatagttaaaaaaagaatagatgaatatagaatttttagttcaggaaaaacaagtacagttataaaaaatgcaggcatacatttagtgaattatgaagacacaattaagtgaacggttcatattgcttaactaaggatgtatgcgaaataggagataaaagtgaataatatatgctttattgcggataggtatcccgttgttaattaccctgccaatacattcttagaacagttgattgcagctatagccagaacaggagtgcattgcacggtaattgcaccttatagtatagttcatgacaaaataacaggaagaaagtataatcctgagtaccacgaagagcgaagttattataatcaaaaggttgatttgtattttcctcgtatatatattccaacagcaaaaacattcttaggaatacattttgctgatatttttctgcgagcatttatgaatgcagtagaaaaaacgattgtggagcaagatattcaaatagatgcactttatggtcattttattaatccaagtggattgacagcggccattcttggagaaaaaatgtgtattccttctttttttgcttatggagaaagctctatacatataatagatagcttggatagggaaaaagtcagagaaattcttaggaatgttacaggcgttatttcagtatctacccaaaataagacagaattaattgagaattgcattgttcatgaaagtaagataggggtatttcctaatgctattgatgataatctttttagaacctgtgataaagctgtgatgagagaagaactggggtttgataaaaatgattttatagtttgttttactggacattttatagaaagaaaggggagtctaagactttcagaggctttagaatgttgccctgatactaagagcattttcattggaaagggtcctgaagaacccattggcaaaggaattctttttaaagggcaggtcgaacataacgagatatacaaatatctaaatgcggcggatgtatttgtgcttccaacacttgcagagggatgctgtaactcgattattgaggcaatggcctgcggactgccgattatttcatctgatagagcatttaacgatgatatattagatgaacagtgctccataagaattgatcctacaagtattgaggcaattagtaatgcaattaatgagttaaaatcaaatagtaacttgttaagaactttgtcgatgggtgctttaaggaaagctgatgcattgaagattgaatcaagagcaaataacattatagcttttatggattataaaagtcgagaggatagacattgatgaaactgaaatattgtacaattgctgaagttgtgacagctttattaatgatttacgaaatatggtatattgaggattttggttctgtacctatgcttcttcaaatattggctatgctcttgcttgcatcagttttttggatgaatagatttgtgattcaaatgagtacagaactgaattattggttggtattcggagtaagttcgttgtgcattggaatgtttattgtggatgacagatcagtattgacatcctcgattaccacatatatttcgttcattttagtatgctatttggtatatcagatatgcctttataaacgttcagtaacttggctggtaaaaataattctggtagcaaattgcatatgtgccgtttccgttatcttctggggtgaagattacaataatggtattcacgttattacaatgggaagtaataataatcctaattatttaggaatatccatgatatacggggtgtttgcttgcattatgttaatgcaggcagacaaggtgttccgcaccttggtatactgcttagtgattggatgcttcggatatgtgactattctgtctggatccagaagttccattttaggattcgtgcttttccttctggttactgctgtgtttagtgttgatattaaaaaattattaagctccattaaaattcgtcatcttttgtattttgcattggggatagttgctattattgtagtgggtaaatatgtcagtgtaaatctaattaactcagccgcttgggaacggtttatgctactaaccgaagaaaatggcgctcatggaagaacagatttgtatcaaatggcattctctttatttaaagaatctccgtttgtgggggttggatataataatttttcaaatgcaagtggtgctggatacttttctcactcaacttatgccgaaactatagcctgcacaggaataataggaacgttgctgtggtttgctccgtatttaatttgtgcaaaaaaaatctggttacttaagaaggctgacataaagaatatctcaaagatgattggtttatttgtcgtgttggtctttatgggaatatttggaatattgtattatacattacagtctatgattatattcacgatgctgattgcctatgctgacatagaattaaagaatatttcatatgaggaagttggatatgaagaagaaattcgtagtattggatcttgatggtactttactttctgataaaaaagaaatagatacgacgactttagactatttaaagagtcttatgataaatgggcacatggtcgctttcgcttccggaagacgctttgataacgcagagagttatgcaaaacagcttttttcggacagttccagagcagggtatgttatatgctgtgatggatgctacatttataatagtactggaaatttattgtgtacatccccgttactttgcggtaaagatttacaatatatttattctgtttcgaagggtgagtcatgcaatttccgcttttactctcatgaagaggattacgctatttatgaaggcaaaagcttattaaaaaatacagtgaaggaactgattgtgggcaagcgcaaggtagaaagggtagtccatagagtaaaagctgaacgtctcaaaactttcaataatatagagaaagttgttttggaaagacagaaagagtgtttttctgataaatgttgtgcagacttggaggaaaagtacaattttcataggatgagcgatcgcaggcttgagatacagaaaaagggtatcaataaggcctatgctgtaagctatctgttggaaatgactggatattgctgggatgatgttttgttcttcggtgatgatgctaacgaccattgtatgctggatacgggatgtacggttgttgctatgggaaacgctgatgacgttatgaaacagaaagctaatcatcttactcttacgaacaatgaacaaggtgttctgaaagcattagagatgttaggcatcatataaagggagggaaagcatatggacgatgctttacgcattagattaaaaaacctgcaatttggcatagattattttctgagatcagattataaattcaatatagaattgtataaaaggaaatttggtaaaacacccgattttcagaatccggaaacttttgcagaaaaattgctatacctgaaaatgcattataataacattctacagaacgtttgcgcagataaatatacggttatggaatatgttagacaatgcggttttccggatatactcaaggagtgctaccagatatgtgtctctccagatgagattgatctttcactcatgccggacaaattttttattcaatgttcacatactcaagggcacaactacgtgatagataagagtgacacagtaaaaattgagcaagtaaaacgtgtttatcggcagttgctgaaaagaaagcattacaaggttttacgagagaactgctacaagtacatacaacccagaatcatctgtggagaatacttgacggagagtgggaagacaagtctgactgattataaattttattgttttggcggtgaaccaaagtattttatggtttcttatggtgagtttgatcacaatgttaggaatcacaaattcgatatggcgtggaattctatagatcattattttaaaaaacaggcagctattgatgcggaaaatattgaaaagcccaagaactttgagaagatggtggaaattgctgaacgactttccaaaccatttcctcatgttcgtgttgatctctacaatttagtaggaagaattgtgtttggagaaatgacattttatagtgcgggaggctttgtgaaaattgattcggatgaaatgaaccgtactgttggcagctggatagatttatcaaagtacaggagtgatttgatttgacaaaaggagtcttttaagatggcggatatagataataaaatagcgtttgctacaaagtggtcttcgctggccgaggtagcagccaagattattctccctgtagtgaatatgattctggcacggttgttgactccggaagcatttggggttgttgcaactgtgaatattgccatcacttttgcagaagtatttcaggatgctggcttccaaaaatatatgattcagcatgagtttgctacttcggaggaatttgacgagagcgcaaatgtggctttttggagcaatttgacgttatcagttttcctatggcttatcatcgcccttttttgtaatgagatagcagcttttatcggagcagaatctttgggattagaaataattgtggcaggtttatcacttcctgtttttgccgtatctagtatacagacggcatattacagaagagaatttgagtttaagaagttgttctgggttcgactttttacggctctgattccattggttgtcactgttccattagcattgatatttcgtaaccattgggcgttaattattggaactttgctaaggaatatagtgcagacaatagttctctacaagggagcaaaatggaaacctcgatttttttataaatttgagcgcctgaaagagatgctgtctttttgtatgtggactcttttagaatctgtgtcaatctgggtaacatccaatgcgagcacatttatcgtgacacgaatcatgggtgttgagatagtaggttattttaaaacgtctatgtctacggttacatcaattattagtattgtgagttccgcaactgttactgtactgtttgctgctttatccagactccagcatgatgataagaaatttacagatatttttattaattatcaagcagtaattggaattcttgtaatcccgatgggtgtgggtatgtttgtatttcgtgatgttgttaccagaattatgcttggatctcagtggatggaatgtgcaaactttattggtatgtattcattggtgaccgcactggctgtcattactaattcatttttcagtgaactctatagagctaagggtaaaccaaaggtctccacatttgcacaaattctgtatctgtgcttattgatcccttcagtatatgtggcttcgaattatggctttgacatactgtgcattacaactagcttgaatgttctatggtttatggcgattcatttcctcatcgtcagattcatgtttaaaatgaatatatgggttatgtttaagaatcttgctgtaatagctgttccaacgtgcattatggccgtttctggggggctgttgaagcagttgaatagtaccatgttgtggcagtttatttcgattttttgctgtttgattatatattttataattgttatgttaattaagccgctgagaaatttgcttaagacaaacgaattgacatcagtagcatacaaaaaagttatgagaatcaaacgctggagttgatggattatgagagttgttctatgtggaaatgacatacaagtaaatattatgtgttccagacttaagaaaagtgtcacagattatgaatgtattagtttcttggatgatggggctaaaataataaatttcgcaaagagtaataaagacactgatgacatcttttttgttgcggtagactccgcacaaaaagataatatgctaaaatatggcattccagatgaaaaaattattgagttctggcggtttaaaaagaccacatatcttaatccaataggcaatttgacatcagaagaggatgtagacggcttgatttttggtatgtcgcattctcagtgtgcaattgatacgaaaaagcttactggacattattataaagtggcggcacccagtctggatttatttttttatttgggtttcttgaataagatttttgataatcagatggtggataagcggaggatacgtaatattattgtcgaattgccatactacatttttaactatgatttatccaggtttggagaatttatcctcactaaactgaaatattttgatgttcttggaaattatcatcattatagtgatgaagattgtattaaaaaatggaaattttttatgtcaatatttgatgaaggaatttcaaaaaatgcggataataatgcgttgagaaaattgttagaatttaagaggattttgaaatatcctctacgtgcatatcgtataagttctcttcatgataaggtgtgggaatgtgtttttgaggagacaattcgagagaacataatgtatttcaatatgtttataaataaactgagaataacatttaaaaatgctaatatcttcatcttggtcatgccttttaatccaatctttagaattactcatagagagtcgataaataagatgaaaaagattttctatgaaatagtagaaaagcaacagttgaagattatagatgaatttaactattattcacgctcaaagtattttgatgatcactgccatttgaatcaagtggggggacgtctgtatacagaacatttaaataaagtaattgaatcaaatcagagatagccgggcttcccgacgtaaaattttggtcgttcaagccaaggaaaggggaggtaaaggcccaacgaactaagtgcaattataaagcgatgaagagaaagaggtattttgcaaggaaatattatatggaatctaatacaaaacacatacatttttatattgattgcgtggctgattgccgtcattatactgagaaaacatcaacattataaaatatacctcacggtctctgctgtggtttatgtagttgttttactctatatgacattgcttggaagaacatcaggtacgaagcatcaaatggaactgtcattcctgtgggaataccgactggctgttgacggcagcctatattggttttctcagatatttgataacatcatgctgttcctgccgatgggatggctgtatggagcgatgagaagatgcgtatcatggaaaaatgctaaatttttcggggcgtgtacgtcccttgctatagaattttgccaacctgtattcaaactcgttctttttgagtttgatgatattttaaacaaaacaatcggaatgatggcgggctatgggctttatcttatactggaaaggaacaggaaacaacgtagcacatagatattaaaaacaaaaccattctaataaccggggcagcaggtttcatgggagcaaacttagtactatccctgctccaaaaacaatcgctggttaacattataggaatcgataacttgaacgactattatgatgtcaatataaaaaactatcgcctgtctcagattgagaaggctatggatgtccatccggaatccatctgggctttcgtgaaaggtagcattgcggatcgtaccgtgatagacaatacttttcacaactaccacccggacatcgtagtcaaccttgccgcccaagctggtgtgcgatacagcattactggatataccggtgcggtgaaaccgctgttccggaaaactggaaaccgccagtccggtaaatggaggttcttccgcatatttcggtatttatgtatatggccggtacatgagctttgcagacaatagctgacagctgtagcggccatacatcgtccgtttcaccattttcagtttgttattggttccttccacaaatccgttcgacaatggacttgccacagaattttcaactgcctcaatatccctttctaatccttttgcaaaacgcgacagatcccgtatatcagaatttatatatttctcaataaacaggtacaacaacggcatactcctccggttgtatatttcccggaactcccgtatacaaacatgaagctgcctgatccgtggataatattccatgatataaatacgatggccttcggctaattccctatccatccagagaaagcggaaaacttctgtccttgaaatgtgttcatatttttgcagtgcctttcttttctggattgtatctttactggtacttttataaacagctatatctatacgttgtcgttttatcattttgttcatatagtcgtaagccgctgtctttccacccttgtatcctttgcggcgcaggttaaggagaacgtccttacggctcatccctgaagtaagttccctgattatataattgatctaagctgctcctatgatccctgcggcacagggattcataatcaccattaaggaacttggtgactgtattccagctgcaatgtattattcttgcaatttcccttttgctgtatccggcatccgcatattcgtggatactgttgtataattgtacactttgggggttatattctactgaattatccacaacctctagtatttttttactttcccgtataacggcagcatcgtctgtcattggggatgggggatcacctattaggatctttatgtccaccagcaccgttgcgtttactatgttttttactgcttccagcaggtcctgatgcaggtggaaacggtcagctacctgcatacagcccggcagtatctcctccacagctttcgcgtatgctgatgcccggtctctagtcaccgtggttacatgcctgttattttccagccatttcttcagtgcggccccaatcccgtccctctagcacagcaaccggcatatgggtgaggtcatccacaataacagtcccgtaagcatggcgctttttaaaagcaaagtcatccacgccaatatggctgctgtattctgcttcaggctgggcctggtatctttttaacaacatacgtactagcgtatccccgctgattttttattcatagctttcataatacgagcacttgcctcacagctggtttcaagggaaagtattgtaacaaaatctaccagacgttccgtcatctcgctgtaataattcaggaagccatggaatgtttcagaaaaggcgcctgtcctgcagcctttattatggcatagagaatcatgtacccttatatccaggaggacacattccccagaataggaaggtcttgtacggtacgatgatgtgtggcatgtagtttatggagtgtttgaccacattgaggacaacaaaaggattttgtccttgataccatgtgcagctttaattcgctgtcattttcttcaacagaaatgatctcaagttcctttggataaaactgttgtagattaagggaaggttttgcaggcataggtacgggcccctttcttttttaattactacaatattatcatgtgtgaacggacaatactatacctttataccaaaatatgcggaagaaccaaaatcatccggaatactcaacaatcccaagcaataattgctaacaggtatgacaattgccttaatgatgtcaaaaagaaagtatatacttctatatgttcccgactataaagaaccacttgcatgatgagagaaccagatattttctttttatttctctggtgagtccatttgcttttttctcttggttaccaacacacaatcaagctttgatgattatttttcacatgatttttttctttagtaaatatccacgtatttttgtcataatattaagtataattaatgtcagaataaaaataataatatgactgaacacataaaacactatactagtctcagactcacatggaacaatgttaatcaatccatatattattaattgattatagcaaacatatactattgaatctcttccaattccagaaaatttattaataacttttataaagaatttctgttgttttgttacgttttttcctataataattaatccatatgacattaatactgcgttaagataaaatagtaggatatttccataatgcgcctctctcatattcacaaaaacgttgaactgaatagaaatggatgaaaataaaatagaaattattccaatgtataattgcttctcagaaaataattttttgaataagtgtaaattttgattcttcttaatttcatatccaatctcataaaatgacaagcctacaaaagcagtatctaaggctaatggtaatctaaaattaaatatgtttggaatgactattccgaacacagccatagtagaaacaaaaacaatacgttttatgatattatcacctactaatttcacaactaattgaaatatagatgtcgtccaaaaaagagaggttaaaaaccatagtgcccctgaaataggcattccagctcctgtattattcactagaagacagaataacgatgatagcggattggtatcacttgtgaaacaataaaccaaccagcttacgaatccacaaatcaagtatggtacaatcaatgttctaaattttcttttgacttcaccggtaaaacttctttgcttaaataaataacctgaaatcaagaaaaaaagtggcatatgccatccgtgaattaatttattcaatactgttgtgcaaccaacatgtccagcaatcatagccaatataccaattgctttgacaaaatccaaataatctaatcgttctttattattcatttgatttcccaatctttttataaatctttaactctttaatttttgaagctaataatgaatttgatcgtagtaaacttgtacccgctgttataatataaaagactgaaccaaaaagtatttgaacaagcaacgaaaataatgtaatccccagaaagttttgaattattctaactatcaatatcatcataagtcctggtatgataaatatagaaacatttttcatatagtgtataatatgcaacttatttctcacctttattgtttggatcaatgcaacggaaaattcagccaaaatggttcctattactgctcctgtctcgttgaataatggaatcaaagcgaggttaatgctcacgttaacaatggcgcctatacaaactgacaatatataaattttatcgtttccagttggtatcaagtattgtgttctaatcacattagcccaagcaataaaaattattgtaattgtaaataattccatcattaggctagttcctgcgaactcttctccgaaataaatcactgtaaatgttggtgctatagcaactaatccacaagaaatagcaacagaaaaaaacattgaaaattgcatagaaatatctagataagagaatgcagtttttttattctgatttgctaataaattcgacattctaggtagcattactgcccccaaagctgtaattattccagtaggtaatgtcatgattttttgaatattatcataaaaccctaaatttatcatattactcattttaccaagcattattttatccattattgtataaatgcttacagcaataaccggaataaaaagaataatattccctttaaaatgagaatatgcttcagatatgcttacacgaacaaacgaaacatatttgtgcaactgaacccacaaaattatattacttaaaatgaaactaccagaaattaatgcaatgtacacatataaatccgttttcgatcttacaagtacaaaaatccctatcgtagtaaggactttaataatgatatttcttacaacagttacagaaaatttttcaattccccaaaaaaaccaatttacatcaaatgcgccagaaagcacatatgcgccccatattaatgaagggatcttatactcattgtttgttaaaaacaagtacactaaataacatatgtaaattgaaattacaagaaaaccatatgataattgcataaatactatttcagaaaatgttttgttcattttttctctatcgtctcttattattgcaatagttctattgccataatttgcaagacccaacattgcaactaaatagaaatagtaggcgatggaattagtaaaagaataaactcccaattgttttgctcccataactctggtcaaataaggtgcagtaatcaaaggaacaacaactattaaaatttgataaaatacactatacagataattttttttaatactatccataatactcctgtcttatatttctggataaacaccaatttttatagatttacttgaactatataatcaaatattttttttgccaaatctactgttgacagattctaatgagcaaaaccactgcatatcacttgttcaattacaaaatttccatttcaataattaattataaaccaaccaatttaaatatagtcatttttctcttttaaatagtagtctaacaactccaaatgcgaacatataatatactagatttccagcatatctgaccattgaaatagaaataccatagacaattaagagatagaacattactgacatgaaatttttattttttaattttacgttttcgtaaaaagtatgacttataaagccgcagataatagaatcaattattacgcccacatatgaagcatcgaaatagaaataaaacggagcaagcacaaaggtattgaatgtaccactaccgcctatatgtgttgcagactgtagctgtgaaccaatatccagtgttgtttgatatattgctggatatgaccctataatccactttaatacaatcataaacggtcgtaataatccagataaaagagaaatcccccatgtatatccgccaaaatcaactgtatttaatctaatactcatatgcggcatacatccacaaaaatagtaataaatagatgtgaaaagatcaaatgaatcgtctccctttctatttacagacaaataatagactattacaattagcagaactgcaattaatccaatagtaattttgctttttaatttttccagaaaattcactcgtctatttgctattaaatatgctataacaatttcaacgcataatatgtacaatgatactctaccacctgtaataatttgagcaattactatccatataactgcagcaatcatggtccatttccctaatattttcttttgttttggaagaactaaattatatgctacaagtgtcatagatgcatacatacatggtaaatgtaaaaaaatttcaaacatagaatcccatgttgctattctatatcctccaacctttacaccaaaataaaccattctagtcatatctaatgtataacctgacatcagcattgaaataactacctgtagacgatgaacacaatataatatcattataacaactattatctgaaataacttataacgaaataaataattaccctttttccctttgccaattacaaaatgaactctctgacctatattgtttttcagaagtgccccaagcgaaaaaaatactgctcctaaaaaactcaataaataagcttgatcgcttgttttattcattccatatagtcttaaagaagctccaacaattataataagccaaaaagcagaaagcaaaaacacaggattataaaaatttttttctttgaaataacttaataatgctatcccaaagaaaactaagacacaaagcaaaaccatcatatacaaatactcctcatattcttttcacagtacttcgattcaatatattcctgaatcggtttcattgctactgaaaaatcaaagtgttcttcagcatacttaacaatatctttttgtatatcattgatagatttagtagtgactcgatcattataaaaacaaataatatcttcaaaatttactggtgaatcatctgccggaattctataataataattaaaatccactgcatcatcaaattctgtttttactccagaaattatcataagtcccttcgcacaatactcttttccttttaatgaactattataagacactcctgatctatgacgtcccatactgtctaagccaatttgacatttattatatatagaatctaattcttttccatactttgctccaacgagaaatatatgttctttcaaattatattcagtaattagtttctgatatatcggatactcttctccattgcctacaatgtacaaatttatttcttttgaatttgcatttacatttgcataataatttcgcattccttcgattgctctatcaaatccgtgccaataatacaatgatgcgcatgcaatcatgttaattggatatttagtggtggatttaatttctctgttacatgtttttatatctattgcattagatgtatttattgttgatataccgaaaatctctttgtcttcagaataagtaactattttatctatatatttctttaatttctttctccaaaatttatctttaatctttaatggtatcatatccattttttttccttctttatcatatggatatgttggtatttctaaaataattttaatgtcaggttttattttttttactttttttaagaaaaaaataaaatccccatccataaaccatgcttttcgaatataaataaaatccaaatcctgaactaaagcataattaaagtcccatgcaattaatgaatgaaaaatcagacgccttaaaattttttcaattgaatgcttcctattaatatatggattatagaaattcattttgtaaccatatttttcaaaggctttatattgaaaataaatttttctttcaataccactaactgatggtttatctaataatttagaatcataaacaaattcaaatgcaatgaataacccttttttcacaaatagatctcccttctaataagacacgcaattctttatctttaattgtctgtctatgtttctgcctttatttcaattattaagtcttttctttgttctgaagaaataattcctaaagttggtaaacccataatatcttaaaaatgcaactgttctaaagagatataacggtaaaattgaaatcaaagttgcattaagatactttttacaatagtatatctcactttcaataaaacaagtgtatccgaatgcggttagtcctttagtactaccacctcccagatgaataatctcgctcttagtattatacaatgtttttaaaccaagactctccatccgagctccaatgatattttcctcttcatataaaaaggtgttctcatccattggaaataattcttttgctgcatattgtgacatcatataacaacacccagataccgcatatacatcaaaaggagtacatagattttttgattcagcgtgaaacttttcgacaaatcttttggagacaaaagaaaatggtgtttttcttagtacatatttatattttccagacaacgtcatcttacagcccatgtttatttcttgtatttcccctgttttggtaaatatttttggtccaactattccatattctttgtgtgtgttaagaaaagaggtcatactttctattgcgttgtctttaaatattacatcattattagatattaaaatatattggcaaccatcatccaatgctttaccaattccaacgttatttcctgctgaatatcccctattttgttcatttcgaacaaaaaccacattcttacatttttgcaaatataggttaaatttttctgtcatctccacattagaagcattatcaaccaaatagattgtgtagttttctttacatgtttctcttatagagttaatgcagtcaattgataaattccattcattgtaaataagtattacaattccaatcataatatttcctttttattcttataattattgagtacttgcaaaatcaaattattttttttattatttcctgccatttagcttttatattctgctcagaaaactttacatttgataattgcagcgaattcatttgtaattcatacaacttgtctctattattaagtagataatttaattttttcgataaaaagtcaactatttcatcgtcacaatatgctttatctaatctatttcgttctgttttggaaacatgtttttttacattgttttcatcccatatttcaaaacaaggagaagtaagatacccattataatcatctataaccatttctttaatggcatacatacttgtggtaatgaaagcacagccatatttcatcgcctccaacgtaaccagagaaaagctatccattctagtcaaatttattagaatattagcctttagatatatcttattaagctcattcctggaaaaattataatcatgtaaaaacacattatccattttattaattatatttatcatactactttccagttcacttaaatttgtaataattgtaaaagaaagatcttttcgttcgctccatccgttcttaattatagcttctatcagttcattcccgccttttaagttaaacttagatgaaataaacaaacaatttatcacatcgctatttgcatcaatataatgtacaatttctttttgtcccatttctctttttatatatggatatatttggtacaatgaaattgaattaggaatgttataatattccttcaatgtatcatagcacgcctctgataaacaaacgattgctttcaaatttgtatcttcaaatgttttctttaatcttagctttgacaatggataggtaggtcttttcacacagtaatggacaggtgcaagcggattttcaagagctaaaacatatggtttatcacttttcagaaatctattataactgaataatgcatccacattggttgtatcaagtattttttttgtttgatacactccaaaaaaatcgagaatatggctacatacgatcgttctgataattttggttatccctttattattatcgcttattatttctgttgtattatcatcactttgaacaaattcgaattctttaaaatcttcagaaaatagttccttccaaaaacctctaacagtatttacacatttcactttattcatagcgggtctccttgataaattacattcaaaactattaatcctttttacctttaagacgcctatatacttttctaataaaagcaaatgtaccagttgcatgggcaatacgtatcaattttccttgaacacctgcaatcattcttctcttaatctgaagatatttcactttttttgatacaccatttccggattcaaacagttctattaattttatatcatcaatatctttttttttatttcgatttttcttaaatattttttctctttcaagagttaaaaatgtcaatccaaaaaagcaaaaatgaatatctggtctatatattgattcattaagtgtcaaatcatataattcaatgaattcattatgtgattcttcatcttgttccaaacacaaataatcaacatcatgggcttctcttattccatacaaagctaatataatactaccacatacgcataactcactattatatctattctttaataccaaagcctctttaagccattttaaagtacttttaaattttagagcgtcgcatctattaataaaacctattgtattgttagataggataatatctcccatttcgatggtttcgtataaattatcagtcatgtgtaaagaatgtttttcaatattaaacaaagacctcatttcatcctttttttcaataagattaaattctgatttgggaattaaaaaataagtacgtactggtgaaaatgtaggaaaacaaggtagtagttttcggtaaacaccagaaaattcattatctccttcttgcgcccatgagtactccttatatatttgagccaagtaataaaacgctccattttcgttcagttctatttgttttttatatagaatttcaaaatcattatcaataatttttttaagatcatcttcatgtccaattgcacttggccaaatatttaaacacaaaacattctgctctgttaatttcaaataatattgtataatcaaatccaaatattcctggtcaaatatactcttttcaaaatattgttgatcatgcaaattatattcacctttaactggcaaaaccaccacaggaacctttatattaaaatataaacaaatcgcaacacgatgagcaccatctagaatatggtatttctcgtcaacaagaattggctgcagctcttcattgtaaccattttcttgcatatcagctattatcttttcaaatgccaatataaagtcttcaggtttcttcttttcgctatacggttcaacaaatgacccccttgtcattgaacgaatatgttttagatacattttttttgcatattcaggacatttttcttttaaatctatatatatgtactttgcaataatatccagtctttccttacaaaccaattttttaggattaacatacactatttctttttctacaacgccttcaatatgaaataatcccaaaatatcactcggtattttataaaccatctcttttcctttctgacataattctttaaacacaataaaatagtaaattactctctatattgtgacatttatttacaattctttctagttacttttttcataagataaattcttaattttgtaggaataaggcatgctcccatatttgcgcctataacaaacatcaaatcaccaaatcctgcataatgctgcttgtagttacgaaactcatatttcacaacagctatactatctttaaaattaattcgtctcttattttgttcacgatttgatctatatttcagtaatggttcatttatatttcttcctaaaacacctgaataaatcaatcgtggaaataagtctgtatcatccattcctctttcactacaataaccaccattttgagtataaactatagattttttatacataactgttgggtgattaaatggaattcttctttttccatattcatatatttcatcagacgttactggcataagctttatgtactccggtttattacaatcatcataaaattcgtacattgcggtacctattacacctacatccggatacttagaaaactcctttatttgcttttcacatcttgtttctaacgaaatatcatctgaatccattcttgcaatcagttcatttttacaatgctttaacccattgttaagtgacgctccacatcctttattctctttttgaacgattcgatgaatacaatcatattttttttcgaaatcatccaataccttatataattcttctgtcaacggtccgtcttccactattacaaagtcatttgttttatatgtttgatttagcatactattaatgctttgttccaaatattctggtttttccttactgtataaaggcattaacacactatattgttccactttcttctcctcatctacgctctatatttcggaaaaaaatccttatttatcgattcacgcatctttactaatttaccatatttttcattatcaaatatcttttttcctatataaaatcttttcacatcatctctgcgataaaaagcttttttaaacttatacaagctatcttcttcacttccaactccaccacctaaatataatgttttacagccattattacagccccacaaagcagcttcgtataatagtaaattggtaggtgctaatttagaaaattcacgaattgaaccagataaatgataattcatatagccatttgcagccaacataattgatgttgcaataaccttttgttcatagaccgcaaaaaatatttgtgcatttgtggataaatcgttcaaaacactatcataaaattcttttttgaaataataatattgttctgcatgatccttatccattgtactattataaatatccataaattcttcatatatctctggatatcgcccattatatatttgtacaccatttttacgtgcttttcgaatcatatttcgatttttgcttgttatattatcccatatcactttcggactagataaatccaatgaaacagtattgcctaacggaataacctcatatttttcttctgaaaacaagtggttttctataactgggtgaaatcgtacaaattcagatataatatcatttgcttcgcaccatttctcatattccgaaaaaagttttgaagatatatcgccttcgattatccaacctccataaccatatggagaggcaaaatcaaaataacaactttctggtagcacacctttaaaatgaatatcttgtgatatatcacgtttcataactacattaacacctcgtgtagacgaatcttcgtaataaaataaataaggttcaccatcaccgtgtatttgaaatccttttacatatccgcttagccaatatgtatcatacttgtcaaatgaacgtatgatttcatcccattttttattttgttctattttaactattctcaaactcatgcttttctatttgattttcctttcgcgttttagttcattccattcctttaaatccatatcacaaccttcttcaaaagtaactccatcacgtttgaacacctttaaaattgtcataaaaaacaccttgcaatccatgtgaaagctcaaattgtctacgtacattttatcaacttctaatttttcatcccaattgagtagatttcgtccactacattgtgctagtcctgttaatccaggtcttaccttatgtctttctaattgtgtatcattcatatattcaacatcacgttgaagcaatggccgaggtccaattattgacatatcacctttcaagatgttaatcagctcaggtaattcatccaaactactgcttctcaaaaatctaccatacttattaagtctcacttcatctggcaacagcttgcctttcttgtctttccggttatccatgcttctaaactttataagtttgaaaatcttctcatctttgcctggacgtttctgtgtgaagaacggattaccgcccataaacacaaccccaagaattatcagtattaaaagtaacggcgaaaaaaagaccagtgcacatagacttaatagaaaatctaaaaatcgtttaaagaattttgcatacatttatgtactctccaactcaactatttattcaaaacaacctctaataacttcaataattctgctctgctcttctgcagtcattttgttatcactcggcaggcataatcctctttcaaaaatatccatacctacatccagtggcttcccgtctttgccgttttcaccaccaccaatataagcattagtcttacctctaccattgccttctcttgtaacaaatccgtgtgttgcatagattggctgtttatgcataggcttccagattggtcttccttctgcattaatacttgcaattgcttccaatatttctgttgggcaactctttccatgttccggattatataaaactttatgctctcctctaacctgttcacacatttcttctggaacgataatcatgcagctaagccagaagtttggaacactattcttttcatcgaaaggattcatctttacaggaagtcccttaaaaccttctttatatctttcatagattgctttcttctgagcaatgtgttcttcaagatatggaatttgtcctcttacaactcctgctattacattactcattctgtagttgtatccaacttcctcatgctgataccatggagcattttctctggcttgagtagaccatttttttactttttcggcatcttctaaattatttgtaaggaacatgccacctgcagaacctgtaatgatcttatttccgttaaaactaattgcattgtaatctccaaatacgccagtctgttttcctttatatgtagctcccaatgattctgcagcatcttcaatgataactgcaccgtgtttatcacatattgctctaatctcatcaattttacctggagttccatatagatgagccacgacaactactttaacgtcaggatagatttcaaatgcttttcccaaagcaacaggatccatattccaagtatcatattctgtatcaatgaaaactggaacaccaccttcgtacacaacagggttaacggttgccccaaaagtgacatcgctgcaaaaaatttttttattatttgacactcccgccaacttaacagccatatgaagtgccgctgttcctgctgaaagcgccacagcgtatttgcatcctactttttcagctatttgtttttcaatttcgtttatatttgctcctacagtagacatccaattagtctgataggcttcagtaatatactgcagttcttcaccatgcattgtcggactgctcaaccaaatcttattctcgaattttttcacctgattgttttctgaattaaacatatggaatcctctcattcgttgttgaattgcttatttttattcttacttttatctaatatctgtgctattctttatacagatgattacgcctttttattgtaagtatggttaaaaaaaacagccaataatccaccgtaattttactcacgctgagccttggccaattacctccattcaattttctactctatattgtgggtcaatccagagtacccaagaagccatcttaacctcttcggttctcgaatctaatgtacaatccatagaaaatttcataatcgggacttgacctagaccctcgaaacccgcataaaatcaaggctttctcttggttgtccctattatactgctattacccgcttaccttctactgctccgtgtgatatatccggctttccgtagagcctctcccccgccagctttacgcagagataaagtgcaacagtacaacaggacagagcgactgcatatttcacctcggccttttcagcggctatacgctctgtcaaggtaatattttcgcctacagtgctcatccaattcgtctcgtaagcttttctcacatactccagttccggcccgtgcatcgtcggactggcaagccagattttactagggcttggtttcaaattatgattctcaagtataaacatgtctcttttactcccttgtggttatcatgtgtctatacttatccgtgtggatattaaaaagagcggcctgatgcaggatatacaaacccaccgtgtattcatcgtaaaacttgtaaaatagtttgcctttgtgatgaacagtgtggtgctctctgcaaaatccgcaagaaacctgatatacgttgtatcgatgtatgccatactacgaaactggtaaatgcgaaaaactaaaaaaccaccgtatgtctacaatggttgtggtaaaaaagcgcattgtcttacgtaaggaatacatctttgccaagctcagcactgccatatatccgcgtatccgccattttcatgtgcttttcggcgaagagtacatggcgtaattgatactacttttattctccagagtcttctccacagataaaagatttgcgtaaactgtacatattaattagtctcaaaatccttgatcatataggccagttcaggaacgtgcataattagactagatagtcctagtagtccttctcaatttatctagtcgatgatgctccgtaataaacattgatataatctaatggggcgcttcacttcatgagattccttgtcctttagcatactaagccccccgtacaacctcttcctcatctgcagcagccacttcgctaagcccttcccggatctccgccacacccccatctgacctgtcatccggatgatacgtaggcacgatctccgccacgatccgcacgatctccgggctttccgcccggctgtatgcatccaggacctccagcttccggaagaaatccccgatatccataggaattggctgcccgatatggatgagctggttgggggtcttcctcatcccttcctcctccatgagcttctcttcataaagcttctccccgggccgcaggcccgtgtacacgatccttatgtcctcgtccggcttgtagccggacagcttgatcagattccgggcaagggtgtcgatcttcacgggctcacccatatccaggacgaagatctcgccgcccctggcataggcccccgcctgcagcaccaggctcaccgcctccgggatggtcatgaagtaccggatgatgtccgggtgggtcaccgtcaccgggccgcctttttcgatctgcttccggaacagggggatcaccgagccgttgctgcccagcacattcccgaaccgtacggccacaaactctgtccgggcctttttgccggaacgatccctgccgtatgggctgccgggcgggcctgtgaatacaggggttccccgcccttccccgggcggcagcagcgggagcaggtcctcccgcccggtgcggctcacctggtccatgctctggatgaccatctcgcacaggcgcttgctggcccccatgatgttggtggggttcaccgccttgtccgtgctgatcagcacgaaccggccgcagccattggccagggcggcgcaggcggtcttgtaggtgccgatcacgttgttcttcacggcctcgcaggggctggcctccataaggggcacgtgcttatgtgccgctgcgtggtacacgatgtccgggcggtaggtctcgaacacccggttgatcctgctggtattgcgcacggagccgatgagcacggtcaggttcagatccggataggaggccttcagctcctgctggatgtcataggcgttgttctcatagatgtcgaagatcaccagccttgcgggcccatgcccggcgatctggcggcagagctcgctgccgatggagcccccgcccccggtcaccaggatggtcttcccgctgatgtggcggaagatctcatccatgtccaccttgatgggctcccggcccagcaggtcctccacggccaccttcttcatcttgctcagggccacctccccgttcaccagctggtacaggcccggcatcaccttcagctcgcacccggtctccttgcagatgttcaggatgtcccttttctcctttgcgtccgctgtggggatcacgaacaggatctggtcgatgccgtatttttccaccccccgcaggatgtcctcccggcctcccacgatggggacgccgtctatgtaccggccccatttgttggagttgtcatcgatgatgcagcagggccgcatctgggtctcggcggaatggagcatctcccgcaggatggtctgcccggccgcgcccgcaccgatgaccatcacccgccgggcggtcttgtccctggcagagctctgctgccggctgcgctccatcaggatgaaccggtaggagaagcggatgaacacccccaggatgaactgcaccaccgggccgattaggtaataggagacaggcatccggcgaaagagcagggtgatcccggccgtgtggaacagggcggtgatcacattggccatgctgatgcggatcagctcggaatagctggcgaaccgccatacgctcttatacagccgcagataccagtacaccagtaccgtgaaggcagtgtgccaggggataaattcaaagaaggcgttcaggtattccggggggatgctggaatacctgcagtcgaaccggagccacaggccggagaaataggccgcggtgacggtgatgacatcatataggactaaatacagggcgatgacctgccagtgttccagtgctcttttctttttcataagtgtctttcttcctccatgtggactgcctatggatatttagttctgagcaattaaagggaactgcttacaactacatacccatggggatcaaataattgttattattcctatgggaatatatgaaatatcgactggataatcacaaaagaaagaggaatagtcagagcctatttttaattaacagaccaataagtacaataaccttgctatttgtcttcatttttataaaatctagccacattgcaaacaggttttttaaaaaaattgtttgctcgtagtcattaaagcgcaaaatatacaaatattttgaacagacaagtaaactcataaaaaacgctttcaaaatatacaatacttttcctttgcttccatttcgatatttatcctgaaaactcctgtgaaacagttggcgaagccaactgtttttgatataatgattagcagttgatagatttatggaaacggtttataaaaaccttccccaacatgaaagaaataacaaaaaacaaagaattacaatacttatatttgttatataaaatgccaacaaaaccaaaacagaaccacatttaccccaagagctgagtactaactgctaattctaatagatacccatttggcattcggcgatgataataatcaaatataccaatgctcaatataggtatgactttaggaatcattatctatctggaatatgagatataagaagaaatctacatctatggtccgtatactaatctctaaactaaagatcacatgcataataacgatgcagatacagtagtgaaatggattccatattaccatggcgtaaatgacaaacataggaccattcatagcattcgcagtacaaatattttgaagatatggcgctgttggaaaagagaaaataaaaatacaagggcaactgcctcagggcagaatgtctatcaggaggaaaaaatgacactttcagatgaagatggaaaactatactatcaattatggttaccgcttcttgagtatgtgaataagaagcatggtataagtaaaaccattaaaagaatgactgaagcaaaaaatctggatcctacggaagtgaaaaagatttcagacaaaatgatagatgatgtgtctattatagatgaatatctttctgtaaacccaggtttacccgaaggaaaccgtaagattatagaaggatggaaaagaagtatggaaaagaagtatcagaggaacattcgccattgaacggcatcttaaaggcggatcaattttcatttcattagaagatgaaaacgtatatcaagtaagcggaatcattacaagcgtaaaagaaatgttctgctatgcaccattaccattgatagtaaaagcaacattgatgccttttcggaacatgataataacggatggtctgattatgccatataatcttcggatcggtggaaatatgaagcgtacgttaaaagatgtatatatgacggcgaaaagaaatggagaaattaaaaaatcactgtaaactggtgacaatcgtctgctcacttgatatacttattgcagactctaggtgacacatacagtctattaatatgtaaaaatgcagccaaacagaggacacttttacagcatcccagcacactgccttcgtggattgaaatacgaaaaattggatgcgatagatgtggataaaagtcgaagcctacatggcttcatggattgaaatcggacaaagagcagaaaggacaatccggcgggaaggagtcgaagcctacatggcttcgtggattcaaacgtcatgacagcattcagggcatttccggcttcgtcgaagcctacatgccttcgtggattgaaaccgactgcgcaatcgcattgattgtgattgacgggtcggggcctacatgccttgccgtaatgtaataggggaggaaaccatagtaatggcgtcatggtatgaattaaaagcagtaaccatcaaggatctgaaacttccagaccgcttcaaaaaaggaatacaggcagctctggatgtcattgattcctttcaattggagggcctatgcagtgtaatcttatttggaagctgcgccgccgaaaaagtgaaaacctcaagtgatatagatctcctaattgtgacaaaggagctgatcgcagacagaaggcttcgttccctcattcgggaaagtattgatgaaaaattaagttgttttcagatttcagcagatattgttttttataccgtgagtaccctagagacagatacatctgtttttacctgtaatattcgacgctatggaaaaattttaatgaggagatgacgaaaatcgtggattcttactatgaagcagcagcaaatgatttcctgtatcttgaaaatataaaaaatatcctgcccaatataggcagctataatcccattggggtaacagctcaaaatattgcagagcgttttcttaagcaccttatacaggtgtatcttttggacaaggattatacccaggtgcttcgttcccataagcttgtaactctttatcaggcaattcacaatgtatataatgactttactttggacaaaaatatgctccgtattttaacggattattatttcgatgcacgttatcccggtgcagattacattattgtgaccagggaggatgccatggaagcaattgaaagtgtagaaactatcaaaaaagcggtagatgcttttatagacagacagaaagataaatccgaatcataggaatcaaacacatcatttataatcgttcagaattggaagtatgccctggtactctgcaagatacgcatgccctttgtacatctcctggtctaaattacactggctttaatcaggtggccctttcgcctggctaaagccagttgtcatctcttgttattttaaaattgaccaaaaagtcatttataataacttttcgttccgaattcccttttcttatacattatttcctctttttccgttatatatattgcaattcttattacaatttgctatgataatatcgttttaaaatcaaatagaaatttttacaaatgtcattttaaataaccaaatacacatatcaaatcataggaaagggagcatcccaatgaaaaaattatctttatcacttttggcaaagcaggttattgatgccaggaaagaaaaaaacatcacccagcgccagcttgcacagctcaccggaattaaccgcggtatgatcgtccgtttggaggcccaggactacattccatctatccctcaattggaagcacttggagaagctctagatttcgaaccgatttcactatttgtcaatgaacataatgcagactggctggacaaatgctccccaaagaacattgcagtagctggaactggttatgtgggattgtccatcgccatcctcctggcacagcataatcatgtaacagcagtagatatcgtacccgaaaaagtagatctgatcaacaacaagaagtccccgattcaggatgattatattgagaaatacctggctgaaaaggaattagatttgactgccactttagacggtgaagaagcttataaaaatgctgatttcgttgttatcgccgcgcccacaaattatgacagcaagaagaactactttgatacatctgctgtggaagctgttatagagctggtactcaaagttaatcccaaagccgttatggtcataaagtcgaccattccagttggatacaccgtcagtgtccgtaaaaaatacaataccaaaaacattctctttagtccagaatttctacgtgaatcaaaggcattatatgacaacctgtatccaagccgtatcattgtatccaccgatgaatctgatgaaacacttgtaaaggcttcccacacattcgcagccctgctccaggaaggagctttaaaggaacacatagatactttattcatgggatttaccgaggcggaagctgtaaaactctttgccaatacctatctggcactgcgggtttcctacttcaatgaattagatacttatgcagaaatgaaaggattagacactcaggcgatcattaacggagtctgcctggatccgcgtatcggaacccattataataacccaagcttcggatacggcggctattgtctgccaaaggatacaaaacagctgcttgccaactatgacgatgtaccccagaatatgatgagtgcgattgttgagagcaaccgcacaagaaaagattttattgctgaccgtgtcctggagcttgccggagcatatgaagcaaacagttcctgggatgcagcaaaggaaaaagaggttattgtcggtgtctatagacttactatgaagagaaacagcgacaacttccgtcagagcagtattcagggggttatgaaacgaatcaaagcaaaaggtgcaaccgtagtgatctacgagcccacactgaaaaacggaactacattctacggttcaaaagtaatcaacaatctggaagaattcaagaaaatcagcaacagcattgttgccaaccgctatgacagctgtttagacgatgtgaaagcaaaagtgtacaccagagatctgtttcagcgcgactgaaaaagaaaagttttgtatatgctgtatattcccaccagccattagtcgtaatatgaatcttgcggtgcggcggagccgccagttcggtgtggtgaggaataatcagtaatatatatgcagcctttttaaccgaaccattattctgacaaaatataaaaaacctacttaaaaaagttgaacgaatggaggaataaaacacaatggagaatctatccttgcagaataaaaccatattgatcaccggcgccgccggattcattggtgcaaaccttgctctggaactgttaagaacacagacaccaattagaatcatcggcattgataacatgaatgattactatgatgtatctattaaagactggagactcatccaaattaaggcctgcgcagccgagcatccggagtcatcctggacctttatcaaaggttctatcgcagataaggctctgatcaatgacatttttcatacacacaaaccagctgttgtggtcaatcttgccgcacaggcaggtgtacgttattccattaccaatccggatgtgtatgtagaaagtaatctgattggattctataatatcctggaagcctgtcgtcattcctatgataatggagaaacaggtgttgaacatctggtttatgcatcctcttcttcagtctacggttccaacaagaaagttccctattctacagaggataaggtagataatcctgtgagcctttacgccgctaccaagaagtccaacgagcttttggctcatgcttattctaagctttacaacattccatccacaggtctgcgtttctttaccgtttatggtccggccggaagaccagatatggcatactttggttttacaaataagctgttaaaaggtgataccattgaaatttttaactacggaaactgcaaacgggacttcacctatgtggatgatattgtagaaggcgtaaaacgtgttatgcagggggccccttccaggggaatcggtgatgatggccttccaatccctccatatgctgtctataatataggaaataacaatcctgaaaatttgctggatttcgtggatatccttcagcaggaactgatccgcgcacaagtacttccgtcagattatgactttgaggcacacaagaagcttgttcctatgcagcccggagatgttccagttacttatgcggatacaagtgctcttgaaaaagatttcggcttcaaacccaatacaagcctgagagagggccttcggaaattcgctgaatggtacaaaaagttttatagagtgtgagaacaaaaaatctatcccttaaaggagcaatgggcagatgtacaaaactgcatccgaccattgctcctttaaaattttgcgtattactgaacgccagaaaatagcaacccactgccatgtttacggccgtgataagagggccggcgttactactttgacacattatggagcttcctgtataatttaagtataggggattccaagaaaaaaggttgtgaaaaagaaatacctcagagtaaaataagatttgtcagtgacccacgattcaggaacagaaaaaacatcattttcaccctggagggaatatcggcgctgcccttagttatactttgaacccagtgtggaaccgatattttatgatgattcctatggatattttggggaccttgcatttttttatgatatgaatttgatgagagtaaggcaattgaggctatttataattcgaatcaaatgccaagggggctggcagataacgtctacgatccattcgtgcttgttcccatgattgtaggtatgtgttataggcaggatgtgaagattgaggaaaatattaagaaaggattatacaagaatggaaaagatattggaagcaccaactggaaagaaggcaagagaaccttattttcagatgataagaggattgtgcatttgtgctgtaatcctcattcattgttatacatccaaaaggaatgatttagaaaattattatctgatagttataagaaatcttgaaaactttgcggttggtgtgtttatctttcttgcaggatactttgctaaaccgatggatagtgggagggggattaaggatagactgaaaaaacttcttattccttttatcctttggggcttattctttgaaatggtttcaagagatttcaatctgataaagttgacataccacatattaagtggtcgttcatcggcacagatgtattacataattgtattgattgagttgatgattatcacgccacttttatggaaagcaacagaaagccgtagatggagcatacttatattggctataacgcccatttacctcgtttgcttttccatactacattaccattttttgcaaatgtcagactggataggcagggattttatagcgtggctgatgtactattacattggaatgctactacaaaggtatggctggacaaagaaaagtaatgttctattgctcatactttttgccgcagcatatgtactgagcgttatagaaagtgtttatgcactgcgtgtcatgaataccatcgatattgcagtgtcgcagctcaagctttcctgcatgctttatatcgtggcagtgatatgccttgtcatgaataacagaagtgtgttaaaaaatacgttgcaaaagacacttgcatatatcggtgacaggtcatacggagtcttttatgtacacacctttatattgcggtgtgtaacctggctaatgaaaaaagctggggtaattgatttgcttaacattcctgcaattcaaatcattcagtttacttctgtactgtcattatcgttgtttacaatctggctgacacatcgaattgataaaagcggtaagtattgtaagctgattggtttttaatgaactaatttgtatctataggagattttacgataagccttaaatcgaaagtaaaaaatacaataaattaattgcgtacagaaaagcaggtacctatcccaatgcccgccaaagtacaatctgctatagcaaaatcccctgagaatcttatagatatccttgtcaacttcgccggtcttgtcgcacacaccgatttttatcacatggctgaagaagagtatgataacattatggatgtcaattctaaaggaacgtattttatgagtcaggtggttagtcaattcatgatagagaaaaaacgaaaggttacatcctgaatgtaatctcgtcctttgcattaagaccagcctggacaccatatcagatgagcaaatgggcagtgagaggtctgacatttggtcttgccgatgcattactgccacatggaattgaagttaatgcaattgcaccaggaccagtggcgacacctatgcttagtaagagcgagggggattcgatagaaaatcctgaaggaccatctggtcgttttgctataccaagcgagatagtcaatcttgcggtgtttatggtcagtgatatggggaatgtgattgttggtgacaccactatatgacgggtggtagcggaacaattgatttgaagcactaaaaacgcttatgcgcatttgagggtggtttgggctgtggttgagcgtgcttttctcaaacgaaaaaggtgcgtagcctgatatctagcctaatatctatggaggaaaatgtccatgcgggtattactgtttggtggcaacggcgcaatgggactgtcatttaaggacatcttgattgcaagaggagatgaaggttacttcccattttccacataataacattggaaacatccgctatttgcaagaggatgcacacaatgacaactttatggatgcgttttaaaagagagttgggatgtcattgtagattttatgatttaccgttctggggagtttgaggaaaaagcaacgaagctgcttaatgtatcaaatcattacatctttctctcgagtatattcgggtttaaaaacatcaattacggaaaagtcgctacggttattacatgtatgtaaggatgagaattattttaaaacggatgagtatgcacttgctaagaagtcagagtaaagtattctgcttaatgaaaagcggaagaactggataatttttcgtccttacattacatacactgtggaaagaatacagtttggtttcaatttcgccccatcagtgtgagcttttcgcttcgaccggtgtaggcatattggtttaacggtgtacggtttcagatagcggtgtgtctttcgttttctatggtatagcctttcctatagtaaaaatacaggaaaggagcataccattatgcaaaactacactaccatcattggcatcagagatatacgccagcgcgggtatatcgtttgatgactgccggagccgttacaacgtcggctacagtaccattactcttataatgagccgttttaaagaatgcggcagggatttaccagtgctgaaacaaatggctccggaggaggtgaaaagaatcccgacttctcagcgaggcgtatcgccttgagatgaatagccgaaatatgagaaatatagaaccgattaacaaacagcaataaatggctgacaaaaaacacaccgctgacgcgaacctcttacaccgctatcgcgagaaaggggttccgttcaagcgaaattagcaccaacctctttcttataattaaagttataactgagtacaccactttacaactttttcacaaaaaaatgccgtacagagcactttggtgtataataagtttgccaacaaaatatacgaaggaaagtgaccctgtacgacaaacttattatacaacgaaaagaacctgattggtagacttcatcaatatttttttatttattttgaaactttttctgcaccgaccgccgagactctgttcctgctggttttatccatcctggctatggaatccgctcattccatccggttcctttaccggcattttttatcaggcataacacaaaaatcccttaacgctttttactacgcctgttcctatgctaaagtggattattcccgcttcatgaatgtgaccgcatccatggctttaaagctggtccctgactccttgaagctgcagcccgtgttcctgtgtattgacgacaccatggtctccaagttcggtaaaaaattcgaggatgtgtcgaagctttttgaccatgcagctcataacggctctaattacctgaatgggcactgctttgtcagccttatgctctgcatccctgtatggaagaacagcaggatcgtctaccttgctgtcccccttggctaccgtatgtggcagaaaaatgagaccaagctggagcttgctgcgtctatggtgcgtcagactatgcccaccttttcagggaagaggaatgtcatcctcctgtgtgacagctggtatgccaagaaaaatctcacatgcgttgtggatgaatatccggatctggacctcatctgtaatgcacggtatgactctgtcatttacgacctggcgccgcagcggaccggcaaaaggggccgtcctgccaagcatgggaaacgtctttcactgaaagaggatttctgtctgtccgacgaaaagattggggattattacacaggtgtacgccgtgtcctcacaaatatttttagtggaagggaagtccttgcctatgtcacatccacagagaaagagggcggttccagacgcctatttttcagtaccatttttccggagcagatgcagattttctgtgcatggcaggagaaggcacctttaaaccagacagggggcggctggatgaaatacatccccttgttctgttatggtttccgctggaacattatgccgacataggcataatgttccatatgccgatattttaaaaatgccgataaagtttttgaggaatcccatgcctgacgcactgccaggcacggggaataagttatcggcatttatttcagaccacatagccgtttgatcgcatcctcatcgttggcatacttaaatgccacatcgtccttaaatacagaactgtcactatcactgagcttatgcaatgcctcacgtttcatttcttcagtaacctttgcgtagaagcgggtcgtctccatattcgaatgaccaagccattcagatatagtggggagcggaactcccgcctgatacaggtgcatcgcccttgtcctcctgaagagatgcgaatgcagatggatcagaccagggttgtccttacggacttttgtctcacatccatcaaggatcctgctcacattatcgctggacatcttgttcttctgaccgttatggaacgaataaaacatcaggctgtcagggtctatgtcctggtggtatttttcacggtatcggccaaactgaacccatatttccttggacaagggagttatcctatgcttcctgccttttccatagaagtgtatatctgcttcaccgctgaaggtttccttgatatccaggagccttaatgacagtacctcgtttatcctcgcgccactctcgtacagcagtgacaggaggaagtgatccctcacagcatcacgatttccagccacactcttgaggatcacacctacatcgcttgtcgaaagccaagtaaaatcaatcaccctgtcgtcatcagcatcgtttatctcacggattgtctcatactcatcaagagtgatcacgtttttcttgtgaaggtaccggcagaatccgcggatatccgataacctgtgattaacagtagtcgccacgttgttccgggctgactttaaccatgccataaatccggctatatttttctgattaaagtctgatgactgcagcgtcatgacagtcaccccgttttcagcctcaagatacgccacgaacaggtttatgctgtatctgtacgaggcaatcgtatcctcatcgcgattcctgacacatggaaggtagaccctcataaattcccccatgagcgatataagctggggatcttttgtcttaatcctcatcttccgggacctcctttccataaatgcaggaaaggaagtcccagtcaatccctttggacccgcggagtttctccggaagcaggtgcacataataaagggtagatgtaatctcggagtgtcccatgtaagccgaaaggtatggaatcagttccagaacgtccttgccagagtctatccagcggattatgttccgcgaagcgaacgcgtgccttaaatcgtatggtcttggggttcccctccatggaatgccgcttctaactgtcaggttccgccatatctgattgtaccatgatgtctcgtactgtgtgccgtcccatttctggaaaaaccactgtctctttccggccacggaatcatatcgcctgcagagatcgagcatatccccggacatgatgatgtgccgatccttatgccttttggagtgcctgatatagacatcccctgtttcaatgtcaacatcctcggtgcgtatcgcgggtggttcctgcggccggaggccgcagcaataaagaaggcgggtatataccggaagcacgatctccggcagatatctcttgccacaggttttccctgtgtatgagtcaacagtatgaaacaagccggacagttcacaatcggtaaaaagatacgggttaaatgccgtccgttttaccacatagtcatcgtccgggatgaaatcctcatatccaaggaagttcaggtattttgtgtattcccgcaggagagagataaaaactgccttgctgttattggtatacgggtaatacgcaagccatccatcgaccatttctgaggttatacgaactgatcccggatagttctcggtacagaagtttataaacggtgggactgaactcctgtatgtttccgtggcataaccgactgacttgcggtatcctatcatctcccaaaatgcttcgttgagccttcctttaaaggtcataagccaccacctccatccttggaactggcactgttttctcggccggaataatagccggaggagaccggaacatccgaaaagtccatcgccacgaacgctatctggcttttatcatgcgtgatatacggcttgtcttcagcaatagttttatgtcccatcatctgtgatgcagtctcaatgccaactcctcttgagaccatgactgtttcaaaggcacgccgtatactatggaaccccctgaatgcagcctttgacaccccagccatttcgcagtacttgtcgatcatgctcccgaagcctttagagagcctgcgatgcggaccctttactgtgacaaagacctctgaaatgttgcattttgggcgccagtcaaggatgtagtccgccagggcattcatggtggcaccgttcagttcggatatgacaggcgtatgtgtcttcgactggatcaccgatactttatggccatgccagtctatgtgggatgacttgatactgatgatatcaatcccccggagcccggtacagtatgcgatgagaataatagcaaaatccctcttaccaagagcatcgtccgtgtcagctgcctctgcgatcctggcaatctcttcttcagaataagcaggaataatgcgccgatggttgttcttcagcttcaggagtgtataatcacggcgaatgttatgattgccatgttctttcaagtactcggttgcatacttcacacatctaagtgtacgccctgtgcttcccccgtttgaagctggaacctcatcgataaggtaagacatgacagtactgtcatctatggactccgccttaataccgcgctgttctgcataccaaaagaaatgccttgtcggagcgcggaggtctttcgtcgttgcgtcgctgattgggtaactgccaagtatcctctcgatgagatcgcttgtctcatcggataaaaggtatttatgcaaaggaaactttgcggttgaaaagtctaccctgccgtattcagcaagcgaagaaagcatgcggatcaccctgtactggaaccgccggtactccttacatatcttgcctgcggaacatcttttgtcgagatcgtctttgtaggaatccatcagttccggagagtatgaatcaatctgcgatgactttgcaaaccggattatggaattacatacgttttgatactgctctgtggatacttcgcgtatcccgtagtccctcacctccttcatgagttgatctgtcaatggctttaataatgaataggttcctgccatatgcggcctccttcctatagcgatgattgttacatctctatagtaagaaatgccgataaatttataaagtgctatatacccgatattcccaagactataaatcggcatttctaaaatatcggcatatggaacatagaaattagctactatgagcagaaaacattctggtcattatgcagctatatggtgcggagtcataaagggatcgaaatgctggtcaacctgatcaacatcacttacagcgccatgaagatactgccttatcaggatgaggcattttcaaaataccgtgaagaaagcgtgcaggaattccgtttttttctaagtgaacagatccggcagcaggtattttttgctactttcgtgcaaaataccgtaaccagcataaaatccaaaggtattataaaggctttgaaacagctggttcaggaacaatgctggcatttgtaaaacttgtaaagtggtgaactgagtagatacactcttttaaatggaaatattctaaattatctgataattgctgttcacctcgttcattataggtattgccacgctatatcttcagctctataatcatctgctccccctgataatttaccaccacatccatgcgtctggaattcctggtctatgcttcaatataataattaccggcttcgttcatgataagcctgagggacaaaaggaactatctatgcccttcctcttcattgaactcctcctgactatctccatagatgctgtcaaaatgctctacaaacttttagaacaagttccgtgtctagtcggccatttcatataaactgtagtgtgttctgagcggcaattttaaacataagattattctgggcttcatcggtggcgagaaaataatcttataatatcgtctcaaagatttggatggaaatgaaaacagttctgttatcattttaggcaaaatcaaacatcaataccatatccatgaggacctcaaatggaccgaatactatcctttccctacagaaaagcatagaataaataccttgctttaattccagttgatccatcagtttcttcacgatggattcaaacaacgtgtttttctctgacagtaatagcttgactgtttcaagaataccttctttcgtccatgctgcccccttatccggacagctcccagttccctcaaccttctcgtctattagtttgcacagtcttgagacgaagaacgggtaaccagaagtataatcataaattagacctgtaatctcatctgtatccatatctatatgatggtcgttcacatattcttattactaaaactttactccatattaggccttttagtgcgatattccctacatccattgtgtttgtgacctacgacaacatccgtaaaagggaaaaaagtgtaaatgtttttacagttatgtttttttaatagtttttcctgtttgcttaaactacttatatatttaacactttaaccattgtagacggataactttggggaaaatggccttacgaaaggctggtattttataaaacagggaacaagtcacgcagatattgtattttaaagttcttttatttctcgcttattctgattatagctctatcttttcctattatccagaggatgtcccatatattcccataggaataataacaattatttgatccccatgggtatgtagttgtaagcagttccctttaattgctcagaactaaatatccataggcagtccacatggaggaagaaagacacttatgaaaaagaaaagagcactggaacactggcaggtcatcgccctgtatttagtcctatatgatgtcatcaccgtcaccgcggcctatttctccggcctgtggctccggttcgactgcaggtattccagcatccccccggaatacctgaacgccttctttgaatttatcccctggcacactgccttcacggtactggtgtactggtatctgcggctgtataagagcgtatggcggttcgccagctattccgagctgatccgcatcagcatggccaatgtgatcaccgccctgttccacacggccgggatcaccctgctctttcgccggatgcctgtctcctattacctaatcggcccggtggtgcagttcatcctgggggtgttcatccgcttctcctaccggttcatcctgatggagcgcagccggcagcagagctctgccagggacaagaccgcccggcgggtgatggtcatcggtgcgggcgcggccgggcagaccatcctgcgggagatgctccattccgccgagacccagatgcggccctgctgcatcatcgatgacaactccaacaaatggggccggtacatagacggcgtccccatcgtgggaggccgggaggacatcctgcggggggtggaaaaatacggcatcgaccagatcctgttcgtgatccccacagcggacgcaaaggagaaaagggacatcctgaacatctgcaaggagaccgggtgcgagctgaaggtgatgccgggcctgtaccagctggtgaacggggaggtggccctgagcaagatgaagaaggtggccgtggaggacctgctgggccgggagcccatcaaggtggacatggatgagatcttccgccacatcagcgggaagaccatcctggtgaccgggggcgggggctccatcggcagcgagctctgccgccagatcgccgggcatgggcccgcaaggctggtgatcttcgatatctatgagaacaacgcctatgacatccagcaggagctgaaggcctcctatccggatctgaacctgaccgtgctcatcggctctgtgcgcaataccagcaggatcaaccgggtgttcgagacctaccgcccggacatcgtgtaccacgcagcggcacataagcacgtgcccctcatggaagccagcccctgcgaggccgtgaagaacaacgtgatcggcacctacaagaccgcctgcgccgccctggccagcggctgcggccggttcgtgctgatcagcacggacaaggcggtgaaccccaccaacatcatgggggccagcaagcgcctgtgcgagatggtcatccagagcatggaccaggtgagccgcaccgggcgggaggacctgctcccgctgctgccgcccggggaagggcgggggacagcccctgtattcacaggcccgcccggcggcccatacggcagggatcgttccggcaaaaaggcccggacagagtttgtggccgtacggttcgggaatgtgctgggcagcaacggttctgtgatccccctgttccggaagcagatcgaaaaaggcggcccggtgacggtgacccacccggacatcatccggtacttcatgaccatcccggaggcggtgagcctggtgctgcaggcgggggcctatgccaggggcggcgagatcttcgtcctggatatgggtgagcccgtgaagatcgacacccttgcccggaatctgatcaagctgtccggctacaagccggacgaggacataaggatcgtgtacacgggcctgcggcccggggagaagctttatgaggagaagctcatggaggaggaagggatgaggaagacccccaaccagctcatccatatcgggcagcccattcctatggatgtgggggatttctttagaaagctggaggtcctggatgcgtacagccgtgcggaaagcccggagatcgtgcggattatggcggagatcgtacctacgtatcatcctgatgacaggcgggatggggcggctgcggatatccgggaagggtttggcgaagcagctgctgcggatgaggtagaggttgtgcagggggcttagtacagacacatgataaccacaagggagtaaaagagacatgtttatacctgagaatcataatttgaaaccaagctctagtaaaatctggcttgccagtccgacgatgcatggtcctgaattggaatacatgaaagaggcctacgagacgaactggatgagcacagtaggcaaaaatataagtgaggtcgagcgcattgccgctgagaaggccggtgtaaaatatgccgtgggattatcctgttgtacggcggcactgcatctttgtgtgaaactggcaggggaaaagctctacggaaagccggatatttcccacggaagcttagagggtaagcgtgtgttctgctcggatatgacctttgacgcaacgctgaatcctgtagtgtatgagggcggtatccccgtgtttatcgacacagacccaaagacatggaacatggatccggcagcacttgagagagcatttgaagtctatccggatgtgaagctcgtagtgatggcacatctctacggttttccgggagatatcgtgaagatcaggaagatctgtgataagaatggtgcgttgattatagaggatgcagcggagtccatgggcgcgaccatagagattgttgaggatggcgtaaccgtggcgaagcagaccaaggttgcccggcagaccggctcattcggagattacggagcaatctcttacaacggtaacaagatcatcacaggttctgctggcggctgtctcttgacaaactctttagaagatgcaaacagggcaaggaagtggtccacacagagccgcgaaaacgcgccatggtatcagcatgaagaggtcggttacaactaccgtatgagtaatgtgatcgccggtgtgatccgcgggcaatatgagtacctggaggagcatatcgcccagaagaagaatatatggagtcgctacagagatggcttcaaggatctacctgtgaccatgaatccgatcatggaaggaagcaaaccgaactactggctcagctgcttactgatagataaagacactatgtgcaggcaggtgagatcgaataatgaaagcctgtatatttcggagcatggaaaaagctgccctacagagatactagaatggctcagtaagtataacgcagagggccgcccgatctggaagccgatgcatatgcagcccatgtaccggaatcatgcgtttatcacagttgatggcagcggcagatgccggacaaatgcctacatagctggcggcagtaaagatgtcggggctgatatttttggcaggggtctatgcctgccaagcgacaataagatgagtaatgagcaggttgatatggtgattgagattgtcagagggtgttttgagtagatagggtcatgagtaaaatggaaatgaagtcaatacataaaccatacggaccgtatgaaaaatatttcaaacgtccgttggatttattctgtggtcttgcagccgtgatcgtgttttgttggttatatgcgattattgcggtgcttgtgagggtgaagttgggcagccctgtgctgttcacacaggaaagaccagggaaagatgaaaagatattcaaactgtataagtttcgaacaatgacagatgccagagataagaatggagaactgcttccggatgaagtgcggctcactagttttggcaagatgttacgttccacgagtcttgatgaactgccagaggctttcaatattataaagggtgatatgagcgttataggaccaagaccactgttggttaaatatcttccgtattatagcgaggagcaacaccatcgccatgatgtgcggccaggactgtccggctatgcgcaggtgcatgggcgcaatacggtagactgggacgataaatttaagatggatgaggaatacacaaggcacatcacgttcttggaggatatgaaaatcatcttccagaccgttgggaaggcatttatcaagcaggaaggaatttcctctgcgacatccgcaacaatggaagattttacggagtatgtccagtataaaaagatttcgggagaaaaggtataaataaacggctgcctggaggtgatgttatgctgaagaaaaactccttgatcagtgtgattgtcccaatctacgagatagaccgatatatcggcatctgcatagagagcatcctgaaccagacatataaaaatctggaaatcatccttgtggatgacgggtcgccggacagatgtccggaaatctgtgacctttacgcaaagatagataaaaggattaaagtgatccacaaaccgaatggcggattggtttccgcccggaaagcagggcttcaagcggcatctggggaatatgtcggatatgtggatggggatgactggataggccccggtttttatgaatctttatattcagcaatcgtgactagtggttgcgacgtagtctgcgccggacacagcagggatctgttcagccagagcgtccattttataaatccttatcctttggggatatacacaggagataaactgaaagacttacagaaaaatatgctctcatatggggaattttaccagcctggcattacgacctatgtctggaacaagctgtttatacgccatgctttatatcaacaccaaatgaacgttgacgatcgcatctccatcggtgaagatgcggctgtgacttacccggtacttatggaatgcgacagcgtgtatgtttcggactgcgtgtcataccattaccgacagcgggaagattccatgctgaagaaaagcgccagttttgaggcagaggcgaaaaaactgaagtacctgtatgaatacatgagcgcctttgctggaaaatacggtgcaaacctgcaggagcaggtggatgactatgtgctcggcatctgcattatgcgttccgggggcaggctgccggatgattcctattccacctttggcgagtcctactacggaaaaaatgttgttctctacagtgcgggaacctttgggcaacagctgatgaaccggtttaaacagagcaaacactgcaatgttgtcggctggattgatgatgattactgggagtaccggaggtgctgcctggatgttgacccggtagatgatatagcaaaactggagttcgattatgtcctgattgcaacggtagactgccggactgccgagaagattaagaaccgtcttttggattatggtattgcggataggaaaatcctgacagtgaattgtgaaaagaaaatgagaagggacctcatcaaaaaatttctgtattgacaaaagggagacgggaagatgaacgatttcgcattaaaagtcctggctgccccgcttggaagaacctggcttttttctgtcgggcaggctggtttcattataaagagcaggagcggccagcttctggcaattgatttgtatttatccgactgtgtggagcggattgaaggccacattgggtataagcgtatgctcccgaaaatactgtcccctgatgaattggagtttgacgtggtcattgccacccattttcacaaggatcatttcgacgatgatagtatgccggagcttatggcaaatcgcaggacaaagctttttgcggcgattgactgcaaagcagagatggaacggctcggtatgtacgaggataacgtttcttatgtcagacctggcgaaacatacaccagcggcgactttacgcttgactttgtgaattgtgaccacggaacagacgcaccagatgctgttggggttgtggtaagcgtggatggcaagaagatatatgaagcaggggatacctgccttcggtcagaccggacagaaggatataaagtaaaaggaccgtttgacctgatgatcgcaccgattaatggaatgtatggaaatctggatgcggcggactgtgcaggcctgtcagatgcattgaagccgaagcttacgattccctgccattatgggatgttcgcttcccatatggggtcaccgggagaattttacaacatcatgacagagcaatacccggacagaaagttcctcatcatgacacagggcgagggcatcgtgattgagtaagtaaaacagatatttgatatgggttaaaagacagcaggacaaagataaatcaaagtcaagaggagaacattatgagcagagaatttgaaggtaagaaattactgattctgggcggaaatccagagacgatccccctggttgagattgcgaacagcatgggtattaagacgattgtatccagtctgcgcaagaccgatccggcaaagaaggtggcctggaaaggctgtgatgtggacggcatggatgttccggggcttgttgcgttggcgagggaagagcaggtggacggtgtattggtgggtgtagccgatatacttgttcctgcctattgtaaggtctgtgatgcgctgggactgccctgctatgcaacgcagcagatcgtggatgtgtttgcatttaaggacagcttcaaggcaacctgtgagcggtacggagtccacggtatcccggaatactatctggacgcagagatgaagcaggaggatatcgataagatcaagttcccagtgatgatcaaacccgttgataacggtggcggtgtggggatgacggtctgctacggcccggaggatttaaaggcaggcgtggaaaaagccctggatgcctccaaacagaaacgcttcatcgtagaaaaatatatgcagtgcgatgatatgggaatgtattacacgttcaaggacgggtattgcagcgcatcctgcatttatgaccgttatacgacagatgaacagccagggctttcccgcgtgtgccttggcggcacctatccgtccaagcatttggatgaatatttcgagaggatgcataaaaacgccgtgcggatgtttaagaatatcgggattaagaatggcgtgctgatgctttccggcttctatgaggacggcgaattctatgtatatgatactggtttccgcctgcagggggaggctccgcaccttctaatgaaagctatacacggctttgaccagagggagatgctgatccgttttgcgctcaccggttccgagggcgaaattgacctgaaagaggctgatgatacttatctacggggaaagtgggcggcgacgctctggttcctgttgaaagagggaaagattgcaaagattgagggattaaaggaagcagaagtagataagcgtgttgttgcgaacatccagagactccatgagggtgatatggtcgtatctgagtggattggcaatgagaagcaggtgctgacgaggctgtatcttgtatgtgattccaagcaggagctggcagacacgttgaaacattaccaggagactgtcagcgtttataacgaaaacggagaaaatatgctgctgaagggctttgacgtcaataaggagatggaattataaagcaggcggggagatgaatcgatggacaaagtattgaaagataaggtaatcgtcatatccggcggcacgaaaggcgtcggaaagacgatggccgaggaatgtgcactgcggggcgcaaaagtagtcatcggagggcgtgacgaggaaacagctaaaaagtccatccgtcagatgcatacatatggaagtgacgggctcttcgtgtataccgagctgacaaaagtagaggactgtgcaaagctctttgacgaagcctatggaaagtttgggaagatagatagtttctttaattatgcaggcattacgccggtatctcccttagatacctgcgacgaggctacgtttgatgcagtgatggatacaaatttcaaggcggcgtttttctgctgccagaatgccgtaaagtatatgcgtatgaacggaggaggctccattgtcctcactggctctacccatgcatggggcggtcagaaggacagggctgcgtatgcatgttctaaagggatattgaagacgctcacggcacatttgagcaagaactatgcgtcggaacacataagatgcaactaccttgtactcggctggacgccaaccgagggcgaggtggctctcaggaaatcccagggtaagagtgaggcagaacttcgtgcggaggcagccaaggtgcttccgatggggcgtatgtgcgagagaagcgattatatcgaaggcatcgtatatatgctgagtgatgcaagcagcatgatgaccggaagcgtgatacggctgaacgccggggagtatatctgagaaaatatcaaaagtagggaagactatgtttgaagaggtaaagaaattacaagaaaaagaatttgttttgctgaaagagttgcggcggatatgtgatgccaatagtatcacatattttcttgcgtatggctctttgataggagcggtgcgtcatcatgggtttatcccctgggatgatgatgttgatgtgtgtatgaactatcctgattacattagatttaaagaagcatgtaagactcaattgggttcagatttcttccttcagactgatgagacagatcctaacgcaggcctttcatattataagctgagattaaataacacaacacttatagtagattatttatcaaaccgcgatatgcaccatggaattagtatagatgtttatcctgtctataatgttccagataattttattcagcgtaaattgcagtattatgcaagtgcgatttacatgctttttcaagcaggccagattcccgaaaatcatggagaaaaaatggcactgttaagtaagctgtttctaaatgtttttcgaggcaatattcgcaatggaataaaaaatcaatgccatgattacatggctaaatttgaggggaaacatacagaaatgaaagctatgttgtttggtaatcttaatgtatgcagacatttgtatccttcagaagttttttcaaaagctgaaacgatgcaatttgagggagaaaacttctctgtgccgattggttatgatacatatttaaaatcatattatggagattatatgaaaatgcctccaattgaagaacagggtatcaagctggatcatatagtaaaagtcagcacagatgagccgtttgaaaaatacaaaggtatcctgtattgtgtaaaaaacgtaggggggggtactacgacatctaaataagcgtgtaatccatcttcttgatgaatggcaaccgatgcctcttgaaagagcgaaaataaagcttgtacaggaggtgtgcccatgagtttccaatatgatcctgagtttatcaaggaagaaacaagagatgggtggcgtataagcaccgaaacaaaaaaagcttggtggattcaacttaaaatattacaggaatttgatcgtatatgtaaaaaacatgaccttcgctggtatcccattggcgggatattaattggtgttattcgtcataagggttttattccttgggacgatgatgttgacgtagcaatgccgagggaagattataacaagttcattgagatatgcaagattgaagtgaaagagccgtatttcctccagacaccacttactgatgtcaattgctatcagacatggattagtcttcgtgacagcagatctaccgggaacagagttagttgtttgaaaacaaaacagaataacggaataggcatagatattcttacacttgaaggctgtgaggataatctatttctatacaagctacgtaggttcccactgacgattctctccacagtttgtaatacctatgttaatgagtttaacaccacaccaaaggctgttgcgattagaaaagtattaagaaaattcccaatcaactatatcggaattcataaatttcttgaaaagcacaacagcaagcatacatgggataagtataataaagttacgttgacactacttgctgatcccattgcaaaggatgttaggcacataatatggttaaaagaggattttgcgtcaacaatagaactacccttcgaaaatataactattcctgttcctgttgggtatgaccgtattctgagaacagaatttggagattatatggtgttccctccgatagaaaaacgtaaaggtaagcatgatgttgtatttgctcctgatgtaccttatcaccaatattgtgcggagcactatagtgtgagatatgatgattaataaatgtttcccatgtttgtttataacacagaaagtttgaaaaaaaacctatgaatctgataagatacatacaaacattacagctcaatatgcgattccgagccgttgattgggccaattttgtccgaaagaatgacatttgggggctaattggtgatgaggttgtatattctcctagaagagttcccctgtatccgtaaatgattaggatccacaataatgtaaacctagcagccggtgtaaagtttattacgcataatgtctcagataacatgatcaacaataagctggcaaaggaaggccgcccggggtgtctgtccgagaagacttgtacataaagacatcccaggtattagtgtcactacgggtgtctcagcgaggtcgatagggacctttgaagactttgatgataagtgcctgaaatggtcgtgggggtatgttactgcgactacccacttccgttgcgcggggtgagtgtctcggatggaacagctgagaagttctggaagaaatttgtttcagatagaataaataataaataaacggaattgagagagggaagaataaatatgttatggcgcagacggagtaggcgaaagttttcagacaaaattgttttgttgctggatgttgtattggggggaatattagtcggtctgctaacttggcaatatttcgatgaagaagcaaagaaacaagaattaagagaaatgtataaaaatgaaaaccaacaaaaccgggtttggtcagacgatgtagaacaagatgggacagaagaaataactcatcattttataacttttatagatgatgatggctatcagactttttatgaaaaattgttgccaataattgaggaaaaggggatatccatatcgacagctgtagaaatggacaatatcggtacgaaagattttatgacgtgggagacaattcaagagtgccatgagcgaggagccgagatattaaatcatacgctgaagcacatagtttcaaaagaggaagccgaggcattatcgacggaagaaaagttagagcagtttgaggactcaaagaaggttatggaggaacatggttacgcgaatactaaagatattttgatttattcaggtgcttcagcaggcgcaacgtggccggaagcccaacaaaccatgagagttggaattaatagttcaggaaatgaagtgaatgtgcagccatttagtcagtacaatatgcatagatatgtggtcggatcagatcatgtacctgattttgaagagatgaaaggatacataaacgatgttgcccagacagatgaaggctgggaaatatggatgatgcattcccataatggccatatgacggatgaatatattgaagcattcaaacaggcaatagactactgtaatgaagttggtgtagagattgtatccgcagagtatgcacttgattattacggtatccccagtacggaatagggagaggaaaatatgattagtattgtaatgcctatttataattctgaaaagtatctggttgattgtttggagagcgtactaaatcagacttatgcggattttgaaattgtggcagtggatgatgggagtactgataaatcaacggatatattgcaaggttacgcagagaaagataacagaattaagtatatcagacagagtaatcaggggagttctgttgcaaggaatacggcacttaaaaactgccggggtgaaatgatagcgtttgttgacagtgatgattggctttcgcctgttttccttgaaacaatgcatgagctgttggagcaatcccaggctgatatcgctgtatgtgactttatgaccaacggcaagacaagagagagtacttggggggggggagatcactggtgtggtagagaatccatcctctgcgaatttgtaaatgatggattctataatcgtattcagaacaaagtatacaggagaacccttgtaaatggtattgagttcccggttggacgggatatgaaagaagacgctgtgtggacaaccagagtaatgctaagagcgcattcggtaatcagaatccccgagggactatataatgttcgggttgtatcaagctctttgagccgctgtcatggatatacagagaccaaattatgtggaatgtatagaaacgaattagataaatgtgagttgttattatcctcagcaaaggataaagaagttgcggataaaattcggttgactgcatggaaaacgatacagaaggccttattatctttcgctgatttaggaaaatttgatgtagatagaaaaattgtcgaaatggtactgaacaataagacgtattttgatggaatagatgctgaaaacatgttaattaccaatcagctagtcaaatcagaagggactgcttcagcgtccaggcttttaaaaagacaaaaactattttatggaactattgacgagaaaaaaagcgtgttattgaattggctgatttcaataaaaaggaaaaaatagaacagtggggtttgttgcaatggaccaaaatatacctttgattagtgtgattgtgccggtttataacgtagaaaaatatttaaaaaaatgcgtggacagtcttcttaatcagacatatcctaatatcgaaatagtgctagttgatgatggatcgccagataattgtccacagatgtgtaatgattttgctaagaagtataacaacattgtttcacttcataaaatcaatggagggcttggctcagccagaaactatggtgttgaaagagctacgggtgaatgggtcgtatttgttgactcagacgactatgtaagaccgaaatatatttcatatatgtggaagctgcatatgaaatatgacgctgacatggttagctgtggggttatccaggaagatgagaacggtaaagaactttctaaatcaacggaaaaagacgttaccgtttttgatggaaaagaggctttttttgcaatctactttgcaaaaaagtcggggcatcgaagttgttcaaaattgttaaaaaaatcgcaaatattacaatatcctttcccgacagggtattttgaggatttcgcaacaacttatctttggctgaatgaatgtgataaagtggtcttgggtgacggatcggagaactaccgctatgtacaaagaggcgggagcattttaaatagtcgacttagcgaaaagcatctgcacgcatttgatatatgcgatgaaattaaaatgtttgttgatgaaaaatatcttgaattcgacaaatacatcagcttgatatatcaggggcaggtaatccaaatattaaataagcagcatatgagcagagagcaatatgccttgatttataagaaatacagaggaatgtttagaaaaagcctgattggaattatctcttcttcaaaattcaagctaagtacgaaactatattgctttctattatgccttacaccgggattatatcgttcaataagaaagcatcttgtgggcataagataaatatttgtaactctgaatgaggtatatgatgagagagaaatttaaagtgaaaacagattatttattatgttttctttgccctccattttcgctgcctgttgcgataaagggaattcgttcaaactttaaagattggcgggcttatgcctttttacttgcaacgttttttgccgcagttgcgtattgctacaccccggtaaaagacgaacctgatatagtccgatattttgagtgggctgagttattaggaggtatgccgtttggccaagcggttacatatgcgcttaagggggaaaaaaatctatatttgcttaacgcttttttatggttaggcgggaaattgggagacttacatttaataccggcattgtcaatctttattgtctattatatttgcttttatataacgtgttatgtggcagaaaaagaggggacacccagtaaatatgtctgctggtatattgtttttgcaatagtgacattgaacttctatgccttgataaacaacgtcagaaacgtactgggattctgcataattggatacgcattttttcgagagatatatcagaaaaaaagggatgtctggacgattatcttgtatatagctccactttttttgcattcctcgtgtgcggtgatcatacttattaggctgattttgctgattccgggaacctataagattatttttgcggcagtagcatcgtttgttatgccactgacggagttcctgtattcccatttaaatttgttttcatccagtaacgctattagtcaggttattaaggtggccataacaaaagcttatctatattacagaaatgatacttcgacatgggctattgcagtttcaaacagtggttctcaaaaaatggccaaggtggtttatatagccgtggctgtattactttgcctagcaatatattcctatcgattttatggcaaagataacagggaaaaagcgaagaatacgaccatgagcgattttgttttttacattggaattgtaacgatagcatgtgcgccgatgccaatgcctgaatattggaggtttgtgtctttattaatcgttgtgggtggagcggtgattcctcctctttatatgcgtggacgcaaaacatctggaattttttcattggcaacatttgtgtgctctccaatatgcatggctctttgggtgcggagcattataaagtgtgaaatccttgacttaatttttaagccatttgtgataagtccacttgttgtcatagttaaggacttgtttaatttgatcttttagctgtttgggaggatacattatgctttttaatatcaaatatatgcttatggtcattttgttctacgcaatgcgtatatttcctataaagaaaaataaaatagttttttgtagtttttcaggaaaaggttttggcgacaactgtaagtacattgctttggagttaatgaaacaaagtcaaaaatatgatctggtatggctgactgccaacggtgacgataaatcggttccaacctgtattcggactgtaaagtacctgtctgtcaagtcggtttatgagcaggcaacagctaaagtttgggttgataacagaagaaagcctggatatgttaggaaaagaaaaaaccagtattacattcagacatggcatggaatgtctgcgttgaagaaggtcgagaaggatgctatgaaagctatgcctacaacgtatacaaaagcggcgatggcagattctcaaatggcggatttgtttttggcacccagtaggtgggatgctgaattgtatcgtaagtcattttggtataacagagaaatactgaagtctggaataccgcgaatggatattctttttaaatatcctagaaaaaaagtagatgagattaaaagcaaacttggtatttccagtagcacacacatagttttatatgtgccaaccttcagaaaaaatcagtctaaggaagatctgaaatgttatacactcgattggggaattcttttgaaagtactgggccagaagtttggagatgactggaggggaatcattaggctgcatcctaatatttccaaatttgcaggtaagttaaaactaccggaaagcgttattgatgcgactaattacccggacattcaagaattgatgctggtatcagattgtgctataagtgattattctagttctttaattgaattttctgtttcagggaaatatggatttattttcgcgagggatagaaatgaatatgatttggatagaggatcttatttcaagttagacgaattaccattccctattgcacagtcaatgagtgatttagtaaggaatataaatgattttgatgttgagaaatataggaaattgcattccgctttttatagccaggtattaggaatttacaaggagggaacagcatccgttgaggtggcagaaaaaatcaagagggtttgtatcaataaaaaatagcggagagttttatgaagggcaaattagatgcgattatcaaaacatataatagaaccccaattcctgtaaaggcaagcttctggttctttgtgtgtagttttatgcaaaaaggtatcagcgttatcaccacgccgatatttaccaggctcttatccacaaacgagtatggaatatttaacatatatatgtcatggacggatttgctgtccattttgctgacactaggtttgtccagctctgtctatcagaaaaaactcgtgcagttagataatgagaagtcacgggatgaattgacttcttctctgcagggcctggcaacaacaacttgcttcatagttttatgtatatatctggtgttcagagaagcaatcaatagttttttgagtttaccgacagggatggttttatctatctttgcaggtgttctggcaacaacagcgtttggcttttgggcgatgcggctgagagtcaattacagatataagaagctggttctgatgacaatcttcacgtctattgctaaaccgacatttgggataatagggatctttttgttcccatcacataaagttgaagcaagaatatacacacttgttttggttgaggtcgttgcttatattggggtgtatatttatcagtttgcgagaggaaaaaagtattatatacgtcaatattgggaatatgcaattgcctttgttttgccattaattccacattatttatcccaacggatattgagccagtcagacaaattgatgatcaaccagatgattggctccagtgaggcgggtatttacagtctagcccattctgtaggatggcttatgactatggttataaccgcattggacaatacactggcaccatggacatatacaaaattaaaagagggaaatataaaacgattgagagaattttcatgcattccgattatctttatgtcaggaatgtgtttagcgtttaccgcaattgcgcctgaacttgtgaatgtttttgcttcaagtgagtatcatgacgcaatatggattgttccgccgatggttttaagcacctattttatgtttttgtatacaatgtttatttatgtcgagtattactttgagaagacgaagtatattatggtagcaacagtagctagtgctgttgtaaacataattttgaactatatttttattttgctgtgcggctactatgcggcggcttacacatcgttattttgttaccttctttatacgatctttcactatgttgtatacagaaaagtgtgcaaagaaaaattcggtatggagatatatgcgattaatagaatttcgattatttccattgctacagttataagtacttttttgttgatgtttttatatgagtatttgttgatgcgtttgctgattgtccttgtagtatgcattatagccttcataaaaagagatgccataaggcatttgcttttaaatttcaagaattgatttttgcaatttagatatggaaataattgataaatgacttacggtgagatatttgcttgaagggaagtcaaggataattggtctgggtgcgaggaaaaatagaaaatataaatggtttcagttggatttggtgaaatagttagatgaaaataaagttaaattatattgttgtatgggacgcaagcatactttatgcacaatatgaggggaagaagagggggatgaatagacgtgaatattgccgtaattttagccggaggcactggaacacgtgtagggggtgatatcccaaagcagtttattaaggttttagggaaaccaattttggcttataccctggataactttcagaatgatccggagatagaagcaattgaggtcgtgtgccataaggattggattgaagaagtcaagaatatttgtaggaaatataagatttctaaactgaaatggcttacgactggcggtgatacattccaagaatcaaccttaaacggtgtgttctaccttcgggataagattagtcctgatgatatcgtagtcatttccttcggtgtgtcgccgttttgttcgacagatatcattaacgacagtattcatatagctgaagagcatggaaatgctataagtgctgaggatttagtcctatgtacttgtattaaggatgacgaatatggcacaacgcagaatttgattcgagaaacaatcaagggattcagcaatccctggacttttaaatatggagagcttgtcgacgcctataacgaggtgattaaaagaggaattctaaataagctggagcctcacacaacctcggtttacctggcacttggcaaacgcttgtggttttctaagtcatcgggctataattttaaaatcactctaaaagaggatttagataagatggaaggtctgttgctgttaaaagaaaaaagaatgtcagaaggtactccggttgaatggtaatatttttgagaaaggactaaatttgaatgattacatacaaggaatttgaagttattaacacaatgctgaagaagaaggatgccgttggagatatcgcaaattatgtctacatcaatgtgcattactacgctttcaagtctcaggatgaggttaccgaactggtaaagagccttgaagataagggctatatcgatgatggaaaagttaccaaactgggactgaaagaaatcgagtctctaaaggtaaacaatgctgtgattcttgcggccggtgatggagatatcaacgcaaagtctgtgtacaatatgcccaagggattgttcatgaaaaatggtgagacacttattgaacggcagattcggcagttgaaggaagccggaattgatgatattactgttgttattggttataaacaggagctttacttcttccttgttgataagtggggcgttaatattgaaatcaacccggatctaaagaaaaataatatctattctctttatatcgcaaaaaacttccttggttcaacttatatccttaattgcgataactactttgaggagaatccgttttcgaagtatgagtataattcttttcatgcgacggtttataaagaagatgctcataatgagctggttgttaagaaaaaccagtctggtcgtattctttctatcaccagctgcgcaacgaacggtgagtgtatttatggccatgcctatttggactcagaaatgagccgcagacttcttcggtatatggaagaagagattgatgatttccgtatttctgccctgttttgggaggaatttatctcccgccacgcagatgatctggaaatgtacgtccgggaatatccggctgatttcctgtttgaatttgacaccattcaggagattcaaaatattgacgggttatttcttggtaatgtatccggatggattaatgagaaaatatgcacagttcttaattgcaatgaagatgagatcagcgatattaatgtccttcaaaaggggctatccaacatcttgtttacctttgtggttcgtggcgagcggtatattttccgctatcccggagacagcacacagttctttatctaccgtaagaatgagtgcgtagcaaataaacttgctgcaaaggcacatgccgatgatacctatatttatatcgatgagcaaggtgccaaaatatccaagttccgtgagaactgcatcgatctacacggaaaatactattatgatgttgaacttatgaaacgcgtagctcggaagattcgtgctttccatgatgttggctatgatatggaagggtgggaagagtataactatgatccggtatggcagactgagcgtctcttcaaggaagctgctaagatgaaggggaatcttttcaagatttttgaaaaggaatggatcatgattcgtaagcttcagaagtatgcggacatggacggtgtcaagcacaccatgtgccataatgatatcaatattgataatgtgctgttgacgggggacaccctggatattattgactatgagtttgctggttacaatgatcctggctatgactttggacgagtaattgccgggctggaatacgaggctgacgaacctaagatcaaagatattctggaagcgtatttcggacatccggcaacaggaaaagaacacctgcactggatggcatattctgcaatccacaactggtactatgtaggctgggcactctataaggaaagtattaacgagagcagccgcgactggatggttttcttctttaagcagaccaagaagctggcttcctggtgcctgccgcagtatgaaaagatgtacggaccgatggatgacccacaggcggctcctgcagattggaaaaaataatgaacactattcttattcttgctgggggtgttggtactcgtatgggtgccaacattcttaagcagtttatcaatataaaagacaaaccgattatagcatatacccttgacatccttgaaaagaacagcgatatagacgctgttgaaatcgtctgcgttcaaggctttgaggatatgttgagagatattataaataactatggattcaagaatttcccatccagcacgtccttcagatactggccatactggttcttcttcagaacttcgtaaactgtcagtacatcctccaggcaagcgaattctatgctgatgttactccacggtcttcacaaagttgatggtatccacaaggctctcgtgtgttccggtatcaaaccaggtaaagcactgactggtttgcgccgatgaatccggcggctcctgtgattaagatggttttatttcttctcgttatctgtctcattcattttcctcttcattttctaattattcattaaggaaaattaacttatatcaatgcaatcttttctttatctgcatcattaagtcattctttgttaatagaagcatagctatatacccaagaatgcccatgaaaactgacaaactcaatgacaaaaaggcatctgtaacagcagacaaaacaagaactacaattattgacatgaaaatcgtgctaagaaaaatagataatgtgtattcataatccactttaaattcaaatattctcctaatagcatatatttgatatgcagtgacacaaatttcagtaatcaccgacgctattgcgactccgttatgctgtaatgaaaaaacaagagtaaaattcaaaattatatttaccactgcccctattattgtggaaatcatcatctgtttctcttttcccactgttacaagcactgaatatccaaagaaattgctaaaggcaacagatattatcgaaacagtcaatattcttgttgtaggtatcgcttcaataaaatcgtttccaaacaaaaaagggacaaaattgcctgccactaaagccattccaacagttgcaggtacagatataagtgtaagtatctttattccgttattaactagtttatcaaattcatattttttatcgtttgcataataataacttaaccgaggtaaaaatacagcgcaaactgcaacaactaacgttttaacaacccttactccttttatcgcattagaataataaccaactactatatcattgcaaaagaatgtcaacatagtggtatctgccaaagtataaacctcaatagctattgaagctgcaagcataataagtactggtttaatatgctgtattacatttagtccttttgtttcaaatttaatatactttcttaaatggattagattaaaaacataatttaatactatggccaacgtatttataagcgcataaataatataatcatcagaagttttcacaaaagcaaaacaggcaataaccgataccattttaataacaagacttctgaccgctatgtatccatactcttctttgccctgataaaaccaatcaacatttataatattgaaaggaattgacaagccgcatactgcaaacaggttaaagcgtgcttgaaaatacgatactgtacaaatcatcatatagtaggctaaagaacatactatagatgatatcgtgttaattataaaaagttcactaaaaaccatgctctgttctttaaaagaatcatttttttcagcaatcaccttagttccgtatgttggcaaacccaatgcagcaagaattgtaaaataggaaactatattttgagctgaagatacccttccaactccttctgccatcaaaattctcgatacccatgcagcagttatcagtggaaataccacatttagacatttatatatgatgttgtatagtgagtttttgactaatgatttcattgatttaacacccgagaagctttagttaatgcttctgccaccatttgatccatatcgtaatacttgtactcactgagccgtccactcaaaatcatgttgttttcctgctcatccttgccgaactcaaaccatttgtactcaatgattcttttccacggaatttctctgtcagtatagttcacagcggcgtttccctggaagttcggcatatcaagcacctcgttctcaaagcgcacagagtgatattccagatagcccagtttgtagtcaaagtacgtatcaatgggacctgtgcagattatcttttctgtgagtgtatccagctcagtttgaggcttcagatagtccacgccaagtcttacttctatttcttccagcatattcgcaaccatctgtgtatagccgccgactggaatgccctcaaaggttagtcgaactgggagacccttgataataaaagccggaaggtctttgcagtcacgttccgactgcttctcagtatatccctttacaagcttttcgtagaaatcatacatcattgtttaactcctagtgatttataaaatttaatataatttcttgcaaaaatgtcggtcgtgaagttttcttcaaaaatcctgcgattaatcatctctttttgttctctctgctctggtgacaatttaaagataatttccagtttttcaaccgcttctgactcactgtcaaaatacaacagtcctgcctcggaaaacttatgaaaatatttattccctcccgtgtttgaaacaagtgacatctttcctacagacagcacttccaacatcacaaggtcgaaataagtctccctatttggtaatacaaagacatcactggaattaacatatgaatgcggctcattcgtccaaccaatttcaatccaatgcgggtgatttagtccctttataggttcttcccttcctgcaacaaccacatatgcttcaggatgtttgttcaggaacgcttctcctatttccttcaacctatcataacctttaatttgattatgacgtccgacataactgattacaaaagcgttttcaggtatgccgagtttttttctgatagtatctctatccgttagcacatttgcaggttttgatcccgtaacaacatatctataggcatcgtgtctttttaactttatctgagaatattcttgccattcatgaatatatggctcatcagattcttcgcatggaaacaatatatagtctgcattattaaatacatatctgtccatttctataagctcatcaagcttttttctaaacagaaatttccagaaaggactcaatgactgtgagatttcatgcgataatggttgtggagaatgtgatgtaataatggttataccacaaaactctttcaaagcttctttcataagaaaataatctcgcgttgaatgaaaatgtacgacatcatattgatttaaattagccatagccttcttcttatgatacaaaatatgaaaaacagattttgccgacttataggaacgataccaccctaaaaaggatttagccgtcttgctttttatcgtttttgattgcacacgcattttttccattattcctgttgataacggcggtaacaaatcgatcgttacaaatccatgatctatttcctttagtgcctcgactaatccatataaatatccactaggcccaccaatcggagccaataaagtcttactgtaataaatcaaaaccttcattctgtcatcccttctataaaacgcatattcttgtgttatcccgtcattatataatgtcggccaaacattcatagaattatgtcgtaataatgcatattaaagaatgctattaattaaatttactatgttcgaatgtcgcctttttcttcgaaataaatattatatcatatattttgtagccaataattaaaacaacccaaatcaaatagataattgtcgtaagtaactcaaatccccaaaatgaatataaggcacaaaatatcattcctgcgagaaaaatgtacttgttatatgaaagttcagatattttggctaccaacgcaacaaccttcatgctaaacctgtacataaatcagttccgaaattagcagtaaattttgttcaaatataatcatcgtagaattatagtatcagtaatatggcataaggcaagacctgtataacatagaaaagtattttactaatatacaaaacagtctttgcacccttagtcaccttcttaatgagcttacaaaaaatatactcgatataattatgagatccatccgatgcatagttattttctcccataagacaatttgacatgagtattattgacatatgcttatattgtaaacaactcaaatattaaccataaatcacctaaataacgatatatatggaaataaatacgaattcagttccgcatttaaaaaagatgtatgaaataaatatataaatccatacaatatagtaattgtgggtaacatctgttcccatgatattctttttttcttaattatatcagtagatgccataagcatcattaatccaatgtttgtataatatacgattcttcccaagttaaacatggaatacatttttataaggcacgacatagaaagcagaattataaaaatactatactcatactgatattcgggtttatatttattttctagtaaagcccatataactaaaataggcaatatatctaaaattccagcaaaagaaatactacctgaaatcacatagtctacatatctatttccaagtaccggaactaaataattaagaaccataaaaaacacaattggcaacaccaatgcaattattattacaaatctcttccaatacttatacatgaattctttttttaactttaatccaactaaaatcagcatagtcaatgcggatatatggaaaagagatgcaacaagtacggtcacaacgaattttttgaaattctgccctttcaaaaatttataaccccagaatacgattcctacggctagaaatatcctaactaaagccgcagacattattagaaaataataatttgtccacaataaaaatactgctattggcatactaatgaatttccgattgtcccatatagctctcccccagaaaagaaaagttatactcgttataacaatctgcgtaatattataattccctcccgttatattatacaaaagataatttaatgttaggtaacccttctccagacctgaaaatgctaaatactttgcccatgtcatatttctggcactattaaataatctctcatatactaaatcatctatacccgtttgtcctctaaacgcaaagatgcttgtcaatacaataataccaaccacatatatagattttttgacaaaattgtcctcaactatttgatttgctaataacactaaagccaaagataatgacataactcccatatagagatgataagtttcttgctgcattggtttgagcagtgtactacctatcgggatgctaatacaatataccagtattgcaacaatcatatcaaatcttaaatgtctaatattgaaatgcatttgacaatctccctacttcttcatgattccccttccatttagaaaggcggacacatcaaagtatttattccaataaaatgtatcgttctctatctgttcatctttttcatatcccggataatatattccacaactcaatgcttcagcttctggttcggttcttacaaaagcaacctttttccctggcaattccatagagtgaaatttctcaataattcctggagtgcatccattcatatatgaaaatttgaaaataaggttttcccaattaatccgtttaacacgcctgttccatttttctttagctaattccggatccatataatgtaggaatacaacttctactccactgaataaccttcccacaggaacatgtccttctccctttagcaacaaatcctctgcatgataagatgcggatgccggaattatctcaatttctgattctatacactcttcaaaagtttccacgaatctgatataatcttctgcatagaaatatgtccccactgtcggactttgcttcggtaacccgtaatacccgtatgctaccccccccccaacagttattcgcaataatggaaaagtccaaattatccaactgttttcttcttattggtgcgagtaaacgctgtgtcttaatgtcaatcttatggaatattctttcccttgctgttggtttaaacatatctgcctctctttcgtttatttggcggtttcgacatgccctttctgaaaagttactttttgaaaatactccttgtaaaaatcatttctacgttcttcaagttcatctttttggtagtgctttgccatcgataaatttcgtatggattgctcttccatcttttcttctttaaacttcaaaagtatattggagatttcctttacatttcgggaagtattactgaaaatcatctcagaatccagtagttctggtattcctccagtttttgccccaaatgctggaaggcctcttgacattgcctctaccaaagctcgtggcaatccttcttgtctgctaggttgcgcataaatatctatcgaatccagccagtaaaagacttgttcatggggaataccaccaagcaattttacttgatcctctacatcgtacttccttgctgtttccttaagaaaggtttgatccccgtcgcctgcaagctgatactcaaaactggtaattcctcttttttttagataacccaacgcttttatcacatattgctgtcctttgtatttcacattcactgcggcggtagtgccaattactatttttttcttgtcatgactatggattctgtcaagtctttttttcagtatttcatcgttgatctcatgtaattccacatcagaacagccaatctgtttaccatcagttggatatcttctctgaagaaatttatttgtaacatataacactgcgggagcacgtttcaccgccctctttgtttccacagtaaatggcagggcaactaacttacccctaaggctatgattccacattgcatcccaacagcagccaaccagctcaatcatatacggcttttgcaaatcccagcaacactccgcagctacctggctaatccgccctggcaatcgtataactgctccatcacaccttctcagaacttcttttattattcgcacagcttcttttttattaaccagtgccttcactgatgacatatttacacatggcgtgaccgaaacttgtggaagagaaatcttagacaagcctgaaggattgtcagttggcttcactctcacacacacctcaatttcatctgcaaaattaaggtaacggctaagcattttgtcattaaatgccacgccatagtatctgccgttactatctatagatataggtccgtcaataaaaaaagcaactcgcatatttatcctccaaaatccatcttgcttcatcaatatatttcggttaatgtattctctcttttttgcgtcaatacagtattatcaggaatctctccgtggacaacgcttccggccccgataacgcagtttttgcctatcctgcttcttcgcaggataatcgtcccggcccctatccaactgttctcgcctatcaatactggcgcgcaacggaatcgtccagctttcacgccgtcctcacatcgaaaatcgtggtcatgatcatatatgagaacgttgggtccaaattccacacccttttcgacaataatcttctcatggcatataatcatacagttataattgattctgacattgtctcctatcctaagttcagcctcatcacgaactttaattttagaacccgaatgaatgcgaaccatctttccgaaatggcaatttgcattccttgacacctctaacacaacattaggcgaaatcctttcaagtggataaaactttatcttatgatttactattttcatcaagcacagcctgataaaagaaatccctagcgaaatcacatttcctatctgcctcctcatgccgcacacctccattcaggttgcgcagcataatgctgacaagcaggtatagctattgggatatcaccacccatgtcaagaagatccactcgtacatgaggaaattcatctgccagatgctcggctgtctgccacaaattcgggtaatttgcgggtttgctgacatcttccagaatcgagtctcctacacgcttgccgggtaaagcattaaaatccctatcaaaaagctttacattcacactggccccagtcactcggttgtccattacataaagaaacttggctctgtatttgaagtaaaaaaacttatagtcaacatgaccatgcccaatttgttttatgactttatgacttgctttctctctacttataatgatcctgtatcttatgtacccccccccccacgatttcaggaaggataaactgttttcccatctcaaaatcaaagctatccggctcaaattctacatagccacttgcattgaaaaatgtcatctctccaaacacaatctcgccctccaaattataaaaatccacacgaacatggggaaaacccgcagaaagtttttctgctatgtcaaccatcttagaataatttctaggcttctccggttgctccaggataggattaaaatcactcctatgtgctttcatcaacttaaaatccctatccaaaaacccaagttcgccaagttcatggtgttttgtatagtttctcataaaatacgagcaaaacaccctgccatcaaagcaaaagaacttataatccgggagatcaccgctttcatcggcgactaacaatttttcggctattattctatgtcttctattgttataaacccactctctccctagattctttttatctatcggcttattcagccaaccctgcataacctgattagcgtttgctatattaagagttgatttgttgtttacgaaaatcatggaacgtccgccaccgccaagcgtatcttttaaaacaaactgatccggcagattatcccagtcaatctcatctatggacttatagatgccatggcattcatttaatatttgcccgcatcccctgcttttaacatacttacggacgcttcccttatcggcacagataggcatcagttcatttctgtaatagagtttataccattgaagtttctctgaatatcgttctggctgtttcagattacacttacgatgtaacttgattctgtattgcagttctatcatctgcttatccggtacgaagcttaataggtttaatattctgtatcgtgccctctcagttctaatgattttcttatagtccataatcaatattcctttacctataaatctttgctcaaattagtcttctgttatgtaatcaccatcagtttttaagtacgacttctttatacttctgaacgtctaccaattggttttgaacaaataaccaataatgaaatagaacagaaagcaatctaccgaatctagtgtaaatatatatgggatgatgcctacaaatcttaaaggagcagtccaatcaaaataatcggcacagccacattccattccttcattattccttctatgaacggaaagcttataaatatgatgcatcaagtttttcagcaattcttcgatatctttctgatgattaagagaatttaaaacacatacttcacttccatatcgaaaatacaaaatactgtatatggaacaacaagccgttttatctttttcagtagatacattcaccagatttttgcttgagtgaataaacctaccaataggaaaacagcggcatttgtatgcttcttaaccacacgaaaagcgcattacaccaaggtatttcgtgaagattaattgggtaaacaacaatggcatgtccaacgagtacaagaaatattgctattcctctcataatgtctatttccttaattctgtttcttttttgcatagcgattatctggctccacatttcttacttcatccatataagcactgactacaatttcccggtcaaactctttttccactttctttcttccggcaagccctatctgctttcgttcttcattcgataatcggatgaacttctctacagcctcaattaaagcctcgagatctttctccggaatcatgtacccatttacaccatcctcaataacctcatgacagcctggtcgatctgttgtaatgattggacgagcggaagcagctgattctaggagaacgttgctcagaccttccgggtaatacgttggatgaatggtacaatgaacttgacgataaaccttacgcatatcttttatcagaccgtggtagataattgtcccatcgtcctgcaactttttaatttcatcctcataagcatcctcacaaaatccgcagatatgaaatcttgtctgtggatatttctttcttattgctttcgctgcatcaagatactggtcgattcctttctctttcataatccgagctacaaatacaaaatcaattgtttcccctcccggatattcaagcggtttataataagataggttgacaccggatcctgggagcatcttatgttttcccccagcaatattcttctttttgaaaaactcttcgtttgctgcattttgaaagaacaccgtttgtgcctttcgtagcgcatacctgtacagattcagtgtaacaatctgcaatactcctttattctcaactgcggttccaaggcctgtgacattcggcacataaggaacaccgagagaaacacacacaatcccgccataaacatttggctttattgtatatgtaaaaacaatatcaggatgaatccgttttatatatttacggtatactctcattaatttcaaatcttccaccgggtttgtcccatgtcttgatatctctgtttttgcaaccttacaaccaagcttcttgatatcatttacaaagtctccgtcagggactgagatatacacctcatgtcgatctgctatgagtctttctaataattcttttctgaacttatataaaccaatgtcattattagcgaggataagtattcgcataaacagtccctgccctttctattcattgtcttcccacaataaacacataatttgtcgtggcacttccgccgatattcagcatcattgcattttttgtatcctttacttgatagcgtaacgccagaccttcaacctgcttatagatatccaaaaacatccttgcgccacttgcacccaccggatgaccacatccgatcaggccaccgctgggattgattggcttcgctccatcaaatgctatcagatcactttctacagcctcatattctttccctggcactgccagtccgaatgcagaaatcgcagcatactctgagctggtgaaacagtcgtgtgtctcaaagcaatcaatatcatcaactgtcattccagctcgcttatagcagtcatccacagcctgttttgtccagggcaaagcatatttactttctgcactgtctgccatcttcttagaaaacagcattggtgctgtcctgtggccgtagcctttcacaattggtttatcctgatattcaggatgttcctttaaatatcgctccgatgccaggacgagaaccacagccccgtccgttacctgtgagcagtctgacacagccaatcgacctccaactaacatattcgtctcagtgcccctgtggcttgcctgctcataatccataaaccattttctggtctgtgccattgggtttctcttggcgttcccatagttgataaccgatatctttgctagggcatccatgtatcgctgttcatcgagattatattttcttatgtattcatctgccaatttcccaaaaagcttcggaaatgggagcgtgatgcccgcaccctctttttcatagaaagcagcacgtcctaagaaatccccaccgattttggtgtccacggttttcattaactcaaagccaactacaacagccacatctatgtcgttggatctgatctttgtaatagccgcatctatcgctactgaactagatgcacacgcagcttcataccttgcgctcggtacaccatagaacgattcatcgacttctgtgagaagtgcgcccaagtgtccttggttaatgtaattctctgcgatgaaattgcccacaaaacaggctacacggttatcctgattcagtttctttatatcatcaaaggttaagtttacggcgtttagcccgtctgtcaccgcttccttcagaagtgccacaacaccttttccttccttaatccaattcctttcgaagtctgtctgagcaccgcccagtacatagactttatttatattgtaaaatcttcccactgagctgcctccttattttttcgctttgataaatttgcgatagtcatacttggacggtacgactctttgcaaaagatgtttcaaatccacatactctaaaatgccgccgtaaatacgctccctgcaaagcccttcaaactcatccatcccgccaagttcctgaatcatcgcaagcggtggacaccagttaaagcctgccgccatcacatcgtcggcggaatggatatcataaccaacaagttcagtcgcgcggagcgagtaaagcacatattttatcaggaaatacaggcacagctctgcctccgaggagcggtttgtttttaggacatggaacgctgtcccatagtcgccctctttcagggccgcaagcatctgttctgcaaatgggaatgtgtatttcatcacattacggtaaatgccggtctccacatcatatacctgacgaattttagcaccgctgtcatgaattacagttttataaagacctcctccgcttttccgtcccagattaccgcttgtaatcagtttctgagcgaaatcaggcagcacgaaagagtcatgagcgaaatcatctgtgttttcataaaggttatctacgatagccttatggacatccagaccgacgaaattggaagtcacaagcggagccatgttgcgtcctgtgaacgggccgaggattgcatcgatataatcaatgccaccgctatatttatacttctcagcacactgtaaagcttcattgatgaactggaaaccgatacggtttccaagaaaagctggagaatctttcacctccacaaccgtgcggaataatacgcttctacaataagccatagcactctcaaagagtccacggtcggtatatcttgtcggtgtcatttcacagagtgtcatcgtatacggtgggttaaacatatgcattcccatatagttgccccgcagctcttccgggtataactctgacaaccctgtgatggacagcccagatgtacctgtgcagaatatggtatctctacactgagctatatgctttacggccgcatcagcaattctcctggtaacggaagatttcactttccaattctccgcagagctttcaaacacaaggtctgattctgcgacacaggattcgagcatcgaataatctgctggaaacatatagtttttaacactctcagccctaacagactgatacgctttatctcttgccgcctcagatttttttaaatcccggcttaccatatatactttagcgtggccaaacgaagcaaagatagcagacacatttctacccattgttccatttgcgccaacgactgtgactgtattgatttccaattcaagcactgctcctttcaatccgaatggagcaggtacttcaccattattttgtgtcctgtaattacagcctatgtcttcatgacctttatctgtttccttgcgggtattccgaaataggttccggcttctttaatatcatccacaactacagctccagctcctatcatacactgcgcacagacattcttgttattcctaatgactgcgccggctccaatccacgtacattctccaatcctcacagttcctgccaaatgtgcccccacagaaacatgaacataatcgccgatgtaattatcgtggtctacagtagcccctgtattaataatgacaccctcgccaattttgcttccactatttacaactactccggccatcaaaactgtccctgactgtatttgtacatcggaggcaacgacagcgtctggatgaatcagagaaactaatggtactccattctctttataataattattcagtttttttcttatttctacgtcaccgactgcgacaaaaacatcacagtcagatttatggatagccgcataggtatgatttcctacgacaggaatctctttctcggatacttctatgcttttcccaagaatgtccgggttatcatcgataaaaaagacttcctcataagcataatgcgctatatcagccactacttttccgtgaccgcttgcgcccaaaatcaatagtctcttattaactataccccccccgatttctgaaagactgtgaaattttattggtttgcatgggcttccgacagccgtacattcattgggaatgtctttcacaacaactgcgccagctccaataatcgtgccgctaccgatatttttcccctgaataatctgcactcctgtgccgagctctgaatactcaccaaccgtgacacaaccggagatgttcacacttggataaacagttacaaaagaacccaaaacatcatcatgtcctactgtacaatcaagattgatgatgcaaaaatctgcaatgctgatattcacagtaaggatattacctgcgcaaataatattccctaagccaagttctatccgatttgacattttcacagatggatcaattaaatttggaaatgaaagatttccgttatcactaattttgtcaattattatcttccttgttttagacgcgccgatggcacaggtaaccgccaatggagtaattcggtgaatcagatagtcacagccaccaagaactgtatgaccgtttatttctgttgcaacttccagaccgtcatctatgtatccgagaatgttccacggtatgtttcccgtctcttttttctgttgttcattgattctttctatcagccactggacttctctgccgaaaccgccagcgccaacaataacaatatctttcatatgtaattccttttattccttgttattcttcgacagtttctggtgtccctgtgaaatactccattgtcgccgcagtttccgagcttatcccctcgcacttcaacactgttttcacagtctggaatataatcttccaatccatcagaaaactcacatggtcaacgtaataaacatccttgtcgaacttatcttcccatgtgatggcatttctcccgtgcacctgcgcatatcctgtaaatcccggtcgaacctcatgccgtctagcttggtgcttgttatagagcgacagatactgaacgagcaatggcctcggacccaccaccgccatatcgccttttagcatattgataagctctggcaactcatcgagggatgtactacgcagtgtcttcccaaatttagtgagcctcaactcatccggaagaagctctccgttctcatttcgcgcatccgtcatggtacgaaacttatacagtttgaatatcttcccattcagtcccggtcgctcctgtgtgaataacacaggtgaaccaagttttatccttacaagagccgctgttatcaacatcactggagagagaactatggtcgcaagcaatgcacagcaaaaatcctgtgggcgttttatgtatttcttatagaagccgggaaagtgaagaatattcgtctcttttttttccttttttacatattttccggcataatacccagccacgctcgccacagcccccacagctacaactaatttcttcttactcatactcaccatccagcacttcattcataaccctgtctactcaaaacacccacgcaccacttcaatcaccatctcaacctgctcatccgtcatcttattgtcagacggtaaacacaagccacgattaaacacagccgccccaacgtcaacatagccgccagctatgtacgcattcgtcctacatctcaggcttccatctctgccaatcacatcatgcattcgatacatcggctgcatatgcatgggcttccagattggacgcccctctgcgttatacttcgacagtatctccaaaatctctgttgggcagcttttcccatgctccggcctatacagtgccttactgtcatctctaacctgttcacacatcgcgtctgcagcaatcagcagacagcttaaccagtagtttggcgtgctgtgctccataatcggattcatggtcacaggcaggcctttcaatccctctttgtagcgtttccacactcttttcttagattctatatgctcttccaaatattcatactgcccacggatcacaccggcgataacattactcatacgatagttgtagccgacttcctcatgctgataccagggagcgttttcgcgactctgtgtggaccattttctggctctgttcgcatcttccagtctgttcgtcagcagacagccgccggagcttcctgtaatgattttattgccgttatagctaatagccccataatcaccgaaagagccggtctgcttcgccacagccactccgttacattcaatatcaatactcgctcccatagactccgccgcatcctctataattagcgccccgtgtttatcgcaaatatcccgtatcctcacgatatcccccggaaagccatacaaatgagccattaccacgagtttcacatcagggtatatttcaaaagccctctcaagtgctgccggatccatgttccaggtagtagcatccgtgtcgataaacacagggataccgccctcataaaccacaggatttaaagtcgcatcaaatgtcatatcagagcagaatactcttttaccttgtaagcaaccatgagaaatctcagactttccgtagagcctctccccagccagtttcacacagagatggagcgctgccgtacagcaggataaagcaaccgcatatttcacaccggccttctcggccgcgatgcgctcaacctgagtaatgttttctccaaccgtggacatccagttcgtctcataggcttcttttatgtattccaattcagaattatgcatcgtcgggctggcgagccaaactttactgtggcttggttttatgttatgattctctggtataaacatgtttctctttctcccctgtggttattttctgtgtgtgcctaccccacacagcacatttttatctatttttttccatgcattccctgcctggtgacagggactttaatacagattttcccaaaaagtttagtagctattatatcaacatcaagaaactttactgggatttggtttcaagtccggaatttccccactccttgggattatccttgcagacaagcttcatcagcatcaatatattcgcagtctaaaaccgctggttacttaaatctcaatacaatatggaacttgcctcttcataaagggaacaatctatagccccttgttttcgtgcgtcaattttccacctcccagccagaatcattaacttatcctttatcttaggaatcccgctcaggcaggatttctgccttgtctggaatcaagattacgaatccatttcacaattacctactatttatttatgagctttatatttttataagcaatctcctaaattgtgtgacaaatgtcttgtttaactataacacctagtatccatgaaatacgttattgtcaagcccagcaccgtcgtatatccgcatacccacccttttcatgttctattttggcgaaaggcacatagcgtaactgatactggctttttctccaaagtttcctccacagatgaaaaatacttcaatcttacttatttaggtcgatttaaaagccttaatcatatagactggctcacggccgtgcataattagactagatagtcctagacttcctgggaatccttgtactttaacatactaagccccctgcacaacctctacctcatccgcagcagccacttcgtcaagcccttcccggatatccacagccccatcccgcctgtcatccggatgatacgtaggcacaatctccgctacgatccgcacgatctccgggctttccgcccggctgtacgcatccaggacctccagcttccggaagaaatccccgatatccataggaatgggctgcccgatatggatgagctggttgggggtcttcctcatcccttcctcctccatgagcttctcctcataaagcttctccccgggccgcaggcccgtgtacacgatccttatgtcctcgtccggcttgtagccggacagcttgatcagattccgggcaagggtgtcgatcttcacgggctcacccatatccaggacgaagatctcgccgcccctggcataggcccccgcctgcagcaccaggctcaccgcctccgggatggtcatgaagtaccggatgatgtccgggtgggtcaccgtcaccgggccgcctttttcgatctgcttccggaacagggggatcacagaaccgttgctgcccagcacattcccgaaccgtacggccacaaactctgtccgggcctttttgccggaacgatccctgccgtatgggccgccgggcgggcctgtgaatacaggggctgtcccccgcccttccccgggcggcagcagcgggagcaggtcctcccgcccggtgcggctcacctggtccatgctctggatgaccatctcgcacaggcgcttgctggcccccatgatgttggtggggttcaccgccttgtccgtgctgatcagcacgaaccggccgcagccgctggccagggcggcgcaggcggtcttgtaggtgccgatcacgttgttcttcacggcctcgcaggggctggcctccatgaggggcacgtgcttatgtgccgctgcgtggtatacgatgtccgggcggtaggtctcgaacacccggttgatcctgctggtattgcgcacggagccgatgagcacggtcaggttcagatccggataggaggccttcagctcctgctggatgtcataggcgttgttctcatagatatcgaagatcaccagccttgcgggcccatgcccggcgatctggcggcagagctcgctgccgatggagcccccgcccccggtcaccaggatggtcttcccgctgatgtggcggaagatctcatccatgtccaccttgatgggctcccggcccagcaggtcctccacggccaccttcttcatcttgctcagggccacctccccgttcaccagctggtacaggcccggcatcaccttcagctcgcacccggtctccttgcagatgttcaggatgtcccttttctcctttgcgtccgctgtggggatcacgaacaggatctggtcgatgccgtatttttccaccccccgcaggatgtcctcccggcctcccacgatggggacgccgtctatgtaccggccccatttgttggagttgtcatcgatgatgcagcagggccgcatctgggtctcggcggaatggagcatctcccgcaggatggtctgcccggccgcgcccgcaccgatgaccatcacccgccgggcggtcttgtccctggcagagctctgctgccggctgcgctccatcaggatgaaccggtaggagaagcggatgaacacccccaggatgaactgcaccaccgggccgattaggtaataggagacaggcatccggcgaaagagcagggtgatcccggccgtgtggaacagggcggtgatcacattggccatgctgatgcggatcagctcggaatagctggcgaaccgccatacgctcttatacagccgcagataccagtacaccagtaccgtgaaggcagtgtgccaggggataaattcaaagaaggcgttcaggtattccggggggatgctggaatacatgcagtcgaaccggagccacaggccggagaaataggccgcggtgacggtgatgacatcatataggactaaatacagggcgatgacctgccagtgttccagtgctcttttctttttcataagtatctttcttcctccatgtggactacctatggatatttagttctgagcaattaaagggaactgcttacaactacatacccatggggatcaaataattgttattatttccagttgatactcctcaatccctcattaaattatcggaattgtgtctccttcactactactctctcctcttctctcctactttgaaccacttccggttagtacaaccttcactgttttgaacagaatcttaacatcttcgcctaaggtccagttgttgatgtactccatgtccagggccaccacttcttcgaagtcggtgactgcgcttcggccgctgacctgccataggccggtgaggccgggcttgatggccattcgggcccgatgatgaagctcgtattgctgccattcgtccactgtgggagggcgggtgcctaccaggctcatttctcctttgagtacattccaaaattgaggaaattcgtcaatggatgtttttcggatgaaccagcccaggccgtgacgggttccgtcggggccgctgccgatgatcctgggatctgcatccattttgaacatgtagcctttcatggcgttgtgggccataagctcctgctttcgctgttctgcgtccatgtacatgctacggaatttgtggatcttaaaggttcttccgtttttgccgattctggtctgggagaaaaagatggggccgggtgaggtcaggtaaatggctggtgctagaaacagggtcaggattccggttaggagaagtcctacaagggctcctgcgatatctatggcccgtttcgtaaagacctgacgtactgtggctatccttatgctctctgtgagaaccaggcagccggccaccttttcgatggtctgcatgtattttctctcggatacaatgttcaggtgcaggtgagttgccacgcccatggctgcgcactgatccatgagttcttccggcagggggtattcctttggtatgtgtatcatgacctcgtccacccaccgcatctgaatgtaggagatggtttccttcaggggacacacaacttcaacgccctggattttctttcctacttgatcggagcggtctgccagaacaacgcccatcacctcaatttctccaagtgtattggaaaggatggttttgagaacctgttcggctgcttgggctgctgttatgaccagcatccttcttttcttataggagcttttctctctgcttgtgatccatttcttccagatcagccgttctgcatacagaaggcagagaccgaagaaggcaaaatacagtaagatcatcctggaaaaggtatcgctggtttttgtaaagaacaggtatactaaaaggagtaaggtcactgctgtcacctgttttaacacggatttgaattccttaagttttcctcttcgcagaatacctttgtggctttccatgaaaaaggcgctgcatacgctgatcagggctaataccacagctgcattcaggtacacgctgctggaataaggattgtcaatcccttgtcttgctatgtaagcaagtaaataagcaagctggaggattatcaggtcgatgaaaataaagtctgcatgtttcagccagctttcggatattttctggtacatcctgccacctctctaaattcataccctgcctttctatagaaggcagacctccctcagttgcttaattccgttcttattctcttctccggcaatccggatgtgtgctggataaaatgggtgttccgcctgttgtaataacaaactgccatttctcaggcacagaaggaccgccggcgccccggcttgattcaggggcatccatcgcaagtaatcacaagcagtcataagaacgaaagtaaacaattgagcttgctcctttatctaaaatcttaggagcaatgatctccgcaggagacatggggatatgctcctgctggagaattgccgggtacgccaaagcctaccctagaggaacagctcctcgaatccttgaccttaggcttccgcttccttataaaccatagctaccaggccaccgttggagtggaaggaagcagtcagttcttcgtcagcttcgccggcttctgtttccagaagctcccatccgtgaacctcacagttatgaagaacgtatacgtccacatcgtctgtcacgttattcacggtaaaggtaacgtccacaggatcttcttctgtaggtgtcgcaccttcaatggtcagttccgcaacaggagtcaggacctttaagtcctctgtgttaatttccttgccgtcctctccagctacctttaaagcagtcatgtctacgccagcttctttaagggcttcgcctacgctctgtcctttttccactgtcttaagagcttcaactaccttcttcacttcctcgggaagtgctgtggtatccacttccttatttacagtaacggtagctccgttagaagcttttacgttatttgtatcaagggtagcggtgatacttcctgctgcaaaagcagaaacgctcatggagagaattgtggctgcggatacaacacctgccagaatctttctcattttcattggttgttcctcctttctgcgaatctagttcgcgaatgaatttattacaaaaagacagttgcccgcaggcttctatcttctgtaacctaggaattatcaagcacggcccgcacaagaaacttcttatctgaagaagcggggtgctctgttaccagagttaaaagcctgctggaggcattcacctccatggtctcgtccacatttgtctttaagcctctttgctcacggattttcttcagataccggcggatagttttttctttggaaaagtctttatcctcagggagatctgatccgtctccggtgtaagtggcgtaaacgcggtaatgtaatgttttatcaggaagatagatctcaatggctctgtgttcctcaaaataggctgggtcttcatagtttaaaagttcaccgaacagagtgtccggctgataattcccgtacagaaccgtatcaaaggctgtaaaaccgccgggattttcttccagggtatagacagctcctgtgggatcttcttctttctctatattatggctgctgtaatagtcatcctctgcctgcaccaaaggacaggaaatggatgttcccggaacagcgatccatccgaatatatcttcattatgggctgcagctgggcgatattcctccggcatgtccggattggaaatttccactgcggcaagtctgtttgcttcttccaggatggcctgttgttcctctctctcctgcttccataaaaaagcggcgcctcctgctaaagaggcgataaccaccagcagaataacggtaatcagtattttccctgtattggacttgttatcattcatacaatcctcatttctgccagttgctttccgtatcagtcttccaggtaaaagatatccaaaaccatctccaggagttttttgtcatccacataaaattcatcgtatactccgtcagattttgtttccccctccaccatgtgaatgttgtctttactgaagctcatacccacaatctgggatacaagataaacggcattgtccactccaatattggtaaccatctgaggactgagctcctggtataaggtgaccggaagtgtgggattttcttttatggcttttttcgcctgatccatgtaggctatggcatattgcttctggcgttccatacgctggttattgctgcctgccacattggtatcccttcgggtgataaagtacagggcctgctggcccatcagcgtcacctgagcatccttgcttaaggccggatcccaataggtgagatcctcgggaacggtcaccgtgactcctcccactgcatcattgagggtgggaattgtgctcataagcagtgcgccatacccgtggataggcaggtcataaaagagcttggacacaacgtctgcaactctctggcagctttcctccatgccatccccataagcataggcaagtgctaaatggttcttggaggttccaatggggttgcctgccacatcgtagttttccatagtgaccatggtatctctggagacaccgatgagatgaacctcattggtggccggattgagcaccagcaggaaaatagagtctgcctgcccgctgtctccggtctgctgtttttcttcaaattcctcctggcggctgtcaatgcccatgcacaggagtgttgtaatgttgtcattgtatttatatttttttccattgtactggaatatggatgggtcatagtcggactgggaagctgcttccttttgtcctgtctttgactggcgcagatccgggaccgtggttcttgcgtttttacgaaggcctgcctcacctcttgcagccagaaattcaaaggttccaatacctgctcccaccacagccagacagatgactgccgccaccattaggcgtttgagcaggcgccccttatttttatcttttctttttttcttcttacgatatctgggttcatacatagtcaagtcactccacaactactgtgagcactgcctgattggagggattgctctgggaatctaccaccagataggtaagggtgtaggtaccgggagtgtttgtatccaccatcccgtttacttgaattttcctccacagctcatattcatcgtcttcatcttcgattctgtccacataactgagctcgtctaactgggttcccgcaggaacctctatgtaatactccgtcaggtaaaagcggggagatccctccggcatggctgcagctgcagcttcctgctcacggcgtgcatccttggccgcccgttcttcttccttctcaccaggattattctcctcctggggagcttctgtcacatccggaatttcttctcccgaagcggcagcaggctcagcctccggctggtttttctcgtcattctggtcctttgtgtcatccggatctttctgggaggttttttcctccttttccttggtgtcatcctcttcttttttatcagaaggatcgcccacatacatctttcgactttttttcactacattattgctggtatctttggctgtataaataatcgtcagctcttctccattttcttcctcatatacagaatctattctcaaggagtccgatacgtctccgtctgtttcgtcctttgctttcacaccctcaagcatttcctctgtgccgccgccgtagtacgtttcacttttgggaaactggatttgtggcggctgacggtcacttttatgaatcaccataaccaaggcgcctgcaaggaccacacagccagcggccagcagcatcaaatgcttcttcataagattccttctcctttgccagaattatgatatcgtttcttttattcatatttttcatatttggaatacttgccatagtatctgccgtatccatagcgtttcttgccataatccaccttgttcaggacaacccctaaaatggggcagccactctttgcaagctggtctttcacttcctgggcaaaccggtagctgatagcttcggattcaatcaccataatggagccgtcacagttttctgcaaggacagcacagtcgatcacgcttcccaagggtggtgtatcaataataatatagtcgtaaacctttctcagcgcggtgatcatatctttaaaatactggcttcccaaaagctctgcgggatttggaggtaccggtcctgcaaataggatgtgaaatttaggaatatctgtcacacagatcacttcttccattttcgcctgtctggacaaaaagtgagtaagacccttaatctcatcgctgacagccactcttcctaaaagaacagatttacgaaggtccgcatccagcagaagaacggactttccgctctccgccagagacatggccaggtgaaaggacacgttgctctttccttcattgggagtacagcttgtgagggctataacctttttatcagcgccgcagaactgaaggttggtacgcagcgatttgaaagcttcatctctttggtaatccagttttgattcagttaacgttattttcttcatgattggttttgtctcccttatcttttcttcttgttcttatgtttagaagactttttctcattggatgccaaaggaatggttcccatggtactcaggcccagatatctgtccacatcctcaggtcctttaatgctgtcattggtaaagaaaacaattaatataacggcaacagccagaagcacacccagcataccgccgatcactccatttttcataagattggggctggccttctcatttgggatattggcctcatccaccacattcactgcctcggtatccatgacattctgaatatgctgggcagctgcgtcccggactgcattggcaatttccctggcctcatagggatccttgtccaggacactgatcgacacaattcgggtatccgtgggagttttcacggaaattttctttaataaggtttcgtattccagttccaggttcaggttagcgatcacgctctccaaaacggtccggctggtgatcagctccgcatagtccttggtgagcagagcacttgtctgcatatcgctgtttgtaagggcatctccgctctggcgggtgagcacatacatttttgtggtagattcatattgaggggtgatcaaaacctttgttcccaccaaagccaccaaccccagcagaatgccggacaggatgatgatccccagctttccccaaaggactccgaacacctccattaaatcaatctcaatttcatcagttctttgttgattctgttccattacattctccttctgtgattttccgtcatttttgatggattttccaaaaaaatcctttttgcgcaggctgttccccatttctgttcaacatagtccgcacattttccaagctctggcctgcggtatttgatcccatggccgtcactggcaacaaaatggaccagatccagcttcagaagcctgcggcacaaatgttttgtgcgcattccttcttttccgagaatgcttcctgcattaacctgtatgtaagcgcccatctctgtgaatgaacgtatattgtcaagattttgtattgccccgggataacgctccacatgagcgatgatcggcttccatccggcagagatcagacggtacagaccatcccgtattttttcaaaagaatctgaagatgaaaattccgtgagtacataggaagagccagccatggaaggccttttatcctgggacaggtttttcaccatttccatatccacgtgatattcacagcccagatacaaattcatcttcagctggctggcttcctgacagagctgtatgaactggttgttcacactttccatggaaggttcaaacatcccacgccggtaatgtggagtgacaataatattttccacaccgttttccctttccaggtgcaacatctctcttgcctcttcccagctggcggctccgtcatcaactccaggaagaatatggcagtgaatatcccataaacctgtcatctgcgtcttatctcctttacagaaaaacagagcgcctgtatttttccgcgccctgcttttaatgtcatctggatttttacccttttgtatccccttgctgctgccataaaaagcgcgtctcacttttccaacatactatttccactgtccataggagcagacagttcatcctcttctgaataaaaatgccggaactgcgcctggaaccctttctttcagaccttatccggtatctttttttgtatcttttcagctttaaatatctacaactttttcacagctttctatattttctattttttttcataaatttttcattttgaaaaattccatcctgcaaaaactaaaatgtcagactaatatacctgacgactcacttattatatacttttatataccttagaaaaatgaactctcaagggtattattttatcttgatagttcatttgaaattcccagcactattggtaatatatacaaaaaaggtgcataattttatggtagaaacaactgaaatcgggctcagactcaaagagcaaagagaattacaagggtatacaagagagcagcttgcggaattggtgaatataacgcccagattctgttacgacctggagcatgggttaaaaggaatgtccctggagacattgtgtaaaatctgtgaaactttaaatataagttccgattacctgctttttggcgctccggtaaacaaaatggaagagaacatggtacggatgttgtcgttattccagtcctgcccttcggaaaagcagacttatcttacaaacatcgttactgcctttatcaaagctgtccggtaggacacttctggcagattaggatctctatgagtttcttggtgcttacattaagtaattttctttgatttggtaagaaaggccccaaaagaaaaagagactgtacacactagaaaaggtgtacagtctcttttttataaatttgcaattccatatttttcttggatgactgcggctgctttttcatacacaggagtgggaacctggtagttcttcccaaggcggatcacctctcctatgaggccatctgcctctgattgttttcctgccagaatatccctctgcatagaagtggttgcctccggattcaaatctgacaggattttcaggttgatctttaccagatcctcttcataggtaattcccatagccgctgccaatgctttgatttcctctatcatggcgataaacatttgtcttggcgggccttctttttgaaaatctcccgccttggcatcatagcaaagtcctgcagcaccgattggagatacataggaaaatttctgcagggcatctttttgtatgttagatgacagcacggcagcaatgtcacattttaaaagctcatccctgatggtctccagaccaggagtatactcctcctgtcttctcacaccgaataccacccgcaggattctgccatgcattagaagcactcctggctccttgatattggcagacacatagatgcagccgtccgtaaccaagatctccggaagtttttcctggagacgtcctcctgtgccatagatattcaatatgggtatcacaatggtgtctttgtgagaaatactttttataaaaggaactacgctgtccagggaatatccctttacgcacacaaatatcacatcggctttcccctcatactcctccatagagcaaacccttacgggaacggtctccctggaaccatcccagattttctccagtacaagtcccttctccttcatggcattcaggtgtgccccccttgcaatgagagtcacatccaatcctccccttgttaagtaagctcccagcattccgccggttcctccagctccgatcactgtatatttcataaccatttcctcctgatgtctttcttttttccattatacgtgctttttccaattaattcaacacgggagcacgttaattatccaaagaaaacaaatattccagcggcagagcgtggatttcctcataggcctccttctgaaaggcgggatccagggggaacactgcatcctcttccagggtttccacggttatggcagggtgcttcagaaactctgcatagtattggacagaatttcctccttcctttgggtttgccatctcctcttctcttctgcccaggcggtacctggacagcttctggagatgcctggccagtcggaagcttttctggttgtacctgggtgacatggactggcggtaatagtaaatcaccttgcctctggaatgaaaatccagataccccacacttttcatctcctgcataatacgcataagagccctggtctcattttcgctgccaggctgatcgtggacacatttccttcggtaggcagcacagggaaaattccggttaatgtcaattcctctggcattctccttccacacttcatgagaaatctgcttcatgcgcagcatctgtctgtaaatggggttttgtatcacccagaagcccttacccgctatttcatacccatcgggatttaccagagggatcatacagatggaataggcatccaaaaggggacgcacctgatagaattcgtcaatcttccaattgctttcataggccatacagtactcctgggtcattttcagcagaagcaccggattcacccgctccctgccatgaatgcctgcagtacagaaaagcacctcctgtccttttcctatgcggagcatgggaatcttcctcccgtcatggctcattcccagcagccgaaattctgcaaagcttttgtaccgttctcccatttcgtacagctgtccgtaaatttcttcgtaggtatactcctgctgtaatcctatcatatccttctccttccggcttgtccttcttatggaaatgcattttcccgagtccttcacgccttttagataagtatatgaaaaaggacaggtccaaagacctgccctttttaaatatcttactttttatgaaactgcctctttttattgatctgcttttttccttttccgggtgatcacatatccgccagccagaatggaagccagaagcagagagatcataggaacaatcggagtttcatccgctgtggccactgcattcttagaagtgccttcgccattgttctgggatgttccgttgggtgctttggtgacaaccgtaccgtcatccagaacctcgtattctacaccgtcgtcatctacataagtcgttccaggtgttctatttccatttccaggaactggtgtactcgtaggtgcatttcctacaatcacaaaagtcttcacaagttttgtataatcaccgtctacccagttggttccatcaaaggtctgcatcttaaatacaatggtaatataataagtgccggctgctacatccgtagttgcagtagtctgtccataataatatccattgctgctctgttggaacataccctgtggagagccttgcttattcacccatcccaatacctgctcgatggtctgctcacttgcatctgctttccagcgtgtgggaagataacgcacatcgcccttattgggattggtattgtccatacctgctcctgatacgccaaaggtaaccttgttgcctctctgatatggctgttccagtcctaccacctggctgtctgttacatttggtaccttcggaactggtgttgcggtaggtgtgggagttgccactgcccagtctcttaccgggaagcggtatacactgctcctgtttccgtctttatctgtaatatagtaatatccgtcgatactgggttcagtaatgccatccacagacaccttcacccggtcactggtaatattggctacggccttgtatccgtccttggggccgcttccacctgtatattctccccgcttggtccagcagaagtaaaccttaccgccgatggcattcttggtatccagaataaattccagctcgctgagagactttctggtggaggaatcgtattccactgtaggcttggtggccttccagtcatctggctgaacctttacggtactgctgacattaccttcagcatcctccacatagaagtaacagtccacactggcctgggtaatatccttcactgtcacctggaaggtatccttggagatggtgccgcctttaataaactccttgggagccgccgctcctctcttcacccatgcatagtagtaagaaccaccctgacagttggctgtctcaagcttgaaggtagcttcactgagagaatttctggatacagcggaggctttcagggaaacctcctccccggtgggatccatatccttaggctgcagacggatcttctcactggcgtttccatttgcatccttgataaatacgtagcagtccacacttttttcatttaagttgtcaaaggttacatcaaattcttctgtgtcaatggttcctgcttcctggaaatcttcatcggccggagtatcgttgcctgtataggcatcccgcacggtccatgcggtatagatcttgccgccctcacatccgtaagccttcagcttggccactgccttgtcaaaggattctctcttcagtgatttctccacataatccagacgtactgccagtctgacaaaattgtcgccttccacctccggtaccaccatggtccagtggtttccgccgttttcatatgtgaggtatgtaagattcttctccaaatctactgtcgctccttcggaagcttttaataagatggagcccgtaagctctgctgtgggatctaaatgcatattcaccacagacccttcggccagatcacttcccagaactagataagaagtattgccggccatacagatattgtcagcggtctcaccgtctgtcttggtgttgtctttaattgtcagcagtccgctcacagaaattggtgcttctgcatatacagctccgccttcggccgctgtatttcctgtaatggccacgctgttaagagtcagatttcccatggtgctgatggcgccgccgttgccggtacccttattgttcaggaaggaggtgccattggctgtcatcgtgccccctgccgataccaaaaacataggtgccacttcggttccctctggaacctgcacaccctctgcaaaagaaccgtctgcagccattcctttatcgccctcagcccctaagatcagggttccgtctacctggaacaggcttcctgcaaaggcaccgcttctggtaaatttcgttccagtctcactggtgctcacaaaggtagctgtcactccctggggaatgatcaaagtattggcaagctccaccttttcctgggtaagcttgataagtaccgtcttgtcttctgcatttgcggcatcagtcagtgctttggtaatgtcctcagcggtggctgcttccacagttccttgagttgtctctgtctcgtcggactcatcggcttccttctcttccccggtctctttcacttcgtcagttccgggagttacctcaccttccccatcgggtgtctgaaccagatcctggtccggtgtctctatgggctgttcttcctctccgggtacttccggatccggactgggcacttctggctcttcgcctgcaggggtctcgcttccctgtgtgccgtccccttcagaaggttcctgcccgtcatctgttcctgtattatccccaggcgtctccccggttccttcattcccggaagcatcaccttcaccactcaaattatcccctgttccttcatttcctccttctgtttcagccgccgctgccacagatccttgctcatctgcgtttgctgcagatgctgccggggccataccgaccgtcagcataccggccaaagccagtgcaaataattgtttttttctcattactttaagtcctccccgtaaatgagtctgatagagatttacaaatatctcctcccagtatatcacatataatctgaaaaatcaaaaaaatttaaaattccaaaatctgttcttctgtaacaatctggcagggccggatatctgtggcctcgtagggcactttttccagcacctgaaattcaaaagccagcgctatggtatgtagatggggatgcttttccagaaagcggtcataaaagcctcctccatatcccactctgtggttttctctgtcaaaggccactcccggcatgatcatcactccatcctgccagtccacgatctctccccgggcaggctcccggatcccatagtagccggactctagctgatcaaaatctgtcagcttatagaagaccaggtccttccccacaaccttgggaactgccacttccttgccctgtctccaggcctcctggataatggcttgggtcatcacctcgtgattgtaatccacataggccagaattttatctgccttgacaaaagccacaagctttgtcacccggtctgtgatctgttcgctcagctgctggacctcctggtctgtgcgttgttttctggcggcaaagatctgttttctaatgagctttttttcttccatatttttctcctaaatgaatcacgcttccgtctggctcctggatatcaatattatcaagctggcttcttaggttcatccggatgctggcaatatattcctgccggagtctggcctgctcggctttctcttcctgtgtcagtccctgagccttggcttttctggccagctcattgatccgctggatctgtttctcgtccataggttcctccttataaaagcttctcaatgtaatcaatcaggtaaaattcttcttttttgttggcggcaaaaattgttccgtaatttcgtccctggatgatccggtggagcacatggaaatcctttccattggcaatgaccatatctgcccccgccgcagtggcgatctcggcagcggtgagcttggtagccataccgccggtccccaccttgctgcccgtgctggatttacccattcccagaaaatgctcgtccagattgtccaccacgtctatgaatctggcgtctggattggtattggggtcatcggtaaaaagaccgtcaatatccgacaggagaatcagcaggtctgccccgatgagggctgccaccactgcggacagggtgtcgttgtctccaaattcaatctcataggtggcgatggagtcattttcattgacaatggggatggttcccagcttcagcagctcctggaaggtattttttgcattttttctgttcagattgtccaccatcgtattttttgtcataaggatctgggcggctatttgattgtactctgcaaacagcttctgatagatcatcatgagtctggcctggcccacagccgcacaggcctgcttctgctccagctctgcaggcttttctccaaatcccagggctgtgcttcccacagcaatggccccggaggaaaccagcaccacatccttgccctgattgtgcaggtcgctgagctcccggaccaaaacctccagcttcatcagattcagtcttccggactgggggtgggtaagggaagagcttcctatctttactacgatcctttttttatccttcaatcgttcccgaatattcatggtaactgccctttcttctttcgtcttccctatcttacaccattttcccccatccgtccacttttcaagtagaataattttctaaaaaattgtacagcttttcctgggaatccaggtattttccttctttaatctccctctgaagcttttccggcagggaagacacctggatctgggtgggctcaaagactgtggtccggtcccctttatagacaaccacctttcccttctcctccatgagataataggtctcatagtctgtgcgcatttgacggatgaccacatgctggggggaaaaggcgatgagggagtaattataatatttggtcctgcttgtgtccaagaactgttccagctcctggcggtccatgcccagaaaattgtctgacgccagggtagtggtctccttaagctggccggagagctggtcatattcctcaatggtacactgggtttccagggagatccggttctgggtctggtctgcctcctgggtgtccttgtcttccagagcctgttccatatgcttcatcttcgccttcatatctgaaagcctgtaggaaccgtaaaagctcagggtaaggacgcccagaaaaacaagaatgccgatactgcagagagtcttgcgcatgttcatcgctcctttttctctatagtatcggcagtaaacttgtttttattcagatcttactcaatggtaacaccatccacacggtcattgagaacaatctccacccaggtttttcctggatttaaaagaatttcctgattattggaatcaaaatagtgggtaacgccccacacctcatccttctcccagcggatatcaatggcctggcctctggtgatgaattttccttcaccgccggaaatggcatcgatattcaaatagccgttctcatcataataggaataaggtgaatattgtaaaataatgttgtcacaggtgagctgctggttgtccaggtcatccacctggggctggccgtattggaaacggctgtatttttttgtagtttcatcataagtaaaccagggattatttacggaaaagcagtccagacgcacagtgttggcgggaactcctccctggggaacgctctcctggccttgtggtgcaaactggtagtggccatcgtatccgtccttgtaatcctgggtgtagcccatggcctgaatcccatcctggatcccctggaagctggtataggcattgtgaggtgccacccggtctgtggttctgtaataaactgcagaacctacactagacagaccgttcaggttgtcaatgagtccctggtcaaaatagttgttggcatacacagcctgtccataatgagcatagatagcgtcaaactcattggcataataaatataataatcacggcagcttctcactgagccgatcttctgcagatcatcatagtcctcaaagattcccataaggcgggtgatatttccctccacaggcacttcgtacaccactcctgctttggaaatcccgctctgagggcagccctcctggatattattgagcataactgccaccgggcgtcttcttcccacagactccttcacctgctcaccggtgagatagctctgcaccatggtttcctggggctcctggctttgatctgcaggctgcatatctaccacgttgtcttgggccgccgctgcaatgacagttcccaagtctccccagacgcctgctgtacaaaccagtgccaaacttaataaaattcctacggtacgcttcttcatataattcccccttatctggtaatgttaagcgcttccagagccttgctctgcttttcttccatcactgccgcctcctggggtgtcatatgatcatatcccaaaaggtgcagcatactgtgtgctacaagaaaacaaaattctctttttacgctgtgcccatactcttttgcctgggccagggcctgttctccggaaatcattatgtcccccagcatcagctctccggtgtccaggtcaaaataggagtcgtcctcctccaccagggagtaatcacccggtgccgaaaaaggaacacttggaaaagacaacacatccgtgggacggtctatatctcggaattccttattcactctgtgaatctcctggttgtccgtgaccaccaggttcacctgaacctcataagggcaggcctccatatccagtacctgctctgccacctggcgggccagggcacaactgtctattcccaggtccttgtcccactcatattccagttccaaagtcacaggcgttccccccttctggttttcgtcttgcctgcaggcttctgccttttctcataggattcataggcctgtacgatctgctggaccaaaggatgacggaccacatccttgctggtgagctcacaaaaaccgatatcctcaatctttttgagcaccttcatggccacatccagcccggactgggcgctggagggcaggtccttctgggtggcatccccggtaatgatcaccttagagccaaaaccaatacgggtcagaaacatcttcatctgggctggggtagtattttgagcctcatccagaataataaaggcattgtccagggttctgcccctcatgtaggccagaggtgccacctcaatgaggcctctttccatattcttggcaaagctctccgctcccatgatctgatacagggcatcatagaggggacgcaggtaagggtccaccttgctttgaaggtcaccaggcagaaaacccagcttctctcctgcttcaatggccggacgggtgagtatgatccggctcacctcctcattgcggaaggccgttacagccatggccatggccagataggtctttccggttcccgcagggccgatcccgaacacgatcattttcctgcggatcaggtccacataatttttctgtcccagagtcttgggcttgatgggccggccctggatggtattgcagataaaatccttatctatctctgtgagcgcctgctccttctcctccatcacaagagaaagggcatagtccacattttgcttatggatcacatttcctcgtctggaaagctccaggagctggctgatcaaacgcctggccctccctgccgtggactctgtgcccaaaatcttcagcatgccgtctctggatatcaaggttacattcaaagtcctctctatgagtttggcatactcgtcaaactgcccgaacacattgccggcatgctctgccggcagctcaaggcttaattcaatgatgctgttgctcatccgctgctgttttcctttccgcaggcacggtggtttgctctacgggaatttccttccccacagcctcttcgatgataattgtaccgtgactcctgcatgtagtatcatttgtttctattgtaacactgttttcgtaaatttgaacccctttttctattaattttttctgaaaattctccaaattcgccgccgccagggcctctgcctcctctttggtgtacatagcttccttattttggaattccttttcctctatctggaagatggtgaagggaaggcggaaattctctgtcaggtacattgggagctccaggtatatctgatctgacaaagaaaagcctttttttaaaaaacccgtctgggccctgtaatcttgaacctgaattccccaggagcttctggtctgcccggtaaatgctttttcctggtgtaccaggggaaactcctgctgataggaaatgggacggcggatcatgatatccgcctgggcaggcacatattcataccggaccacctcctggctgtcattggtgatctccaggcagccgctcaccagcacatctccttctttgcactcctgtcccggaaacatttgaggcacaccccgcttagtcaccatttttacaatggttccagacttgtcggccaggatgctgcagggctgcttctcctcttgttcctggaccacaagctgacgatctgtgttctcctgtatggtcagcttcagcctggtgcccacgatttttgcagaaacccaggtcacatcaggaaaatttttccggatggctgctgctacctggctgcaattgatcctgctcttgagaattccgtggcggatctggttctgctccaaaaattctagaatgacctgggtgctcagcctgctgtttccctccacatgaatgttccaaatgtgggtggaaagtacaaagatcaggcagaaacatgccagaatccccacaaaaaaagcctttctctttttatttctgtaaaaaaagaagggcagtccatgtttttccagaatccggatacggactccgcttttttttaccaggggccgcagccggtaaaagtcatccagctccagcttcatggttaattccttgtcccccagctttaaatcatacaggcagattccgtggtgggcacacatatttaaaaaccgctccggggacggatgactcacccgcaccaccacatagccctttctgaaatccgggccttctcccgccatagaacccctcctcaccgtttcatggatatctggttgatttgtccctttaccttcagctcccccacggtatagtagggaatctgaagagccttgccgtgtatttccacaaaaccattcttcgtctggacctctatgtattccggggacagcttccggacggttttgtaattttcaatggacagctctcttcgaccagtcaaaagtatcacaggttcggaaaaagccaggtcctgtgggatttccatcgccttcacaaggctttccttgaaactgggttttctttttttcacataaaaatcccccggcttttattctctactctatgaaaaaagccgggggattatgactgttcttgcttttaccgaaacaggatcatagaaaaccaaaggatggtattgcctcctaaattgtattccattgcctcctgctccacaatctccgccaccaccactccgtggctttccagacagggatgcatctgctcaggatggcggcagggggcatccgggtaggtgcaggtatcgcagatatcacaggactctgtggacaggatgaaaatttccctgccctgctcctttatatattctccaatggcgttagtgatctcctcgtgggcatgtctggtggccagcatctcctgcatattcagcacatccgtcacctccgccacactggaaaagatcagagcctggggatagctcttgatcttttgttcattctccttcaagtcccccaccccgggagggcaggcccaggttgttccataccgctcacattcctgagtgcacaccatgcgcacccgttcctggatctgaatgctgtctgtatttaagatccggtattcaaaaactggatattgggaaacaaattcgtcaaagccctgtatttccatgataacctccatagggcggcgcaagcttcaggtcccggtctgtgaacagagcatccaccgcccgctgataatcctgcagcttcactgccttttttatcttttttccgtattttgcgctgtcctcaaacatctgaatcatgtaaaaccacagctccttcatgggatggagcagatgggcatccccggacaacaggcccttgtactcctcatatagttgatcatgaaagctccggaaatgctttttgtccaccggctcctgaaaaatctggttgataagcccggggtttgcaatgtatcctcttcccaccatcacacggtccacctggggaaagcctttgacaaactcctcatagtctgtgagggtgaaaatatccccgttatagcacaccgggcaggtgctcatggccagcgcctcccggaaaatttccaggcggggatgatttttataataatccgtcatcaccctgggatgaatgatcagctcctccaggggatattctctgtagatctccatgagcctgaaaaattcctgaggctcctcttttccaatgcgtgtcttaatggaaatccggcagggtgccttagaaaacacttcctccagaaagtgatggagctcatctggaaaggccagaaaacccgctccccggttcttggaggtgacggtcttggagggacagcccagatttaaattgatctcatcatagcccatatcattaagctcccgggctgtgcgcagaaaatcctgtgcctgattggtgaggatctggggtacaaggggaattccttgattattttctggaaatagatctttgagctcccttgtcttgaactttatcttctggtgaggcaccagaaagggggcaaaatatttgtccataggatgaaaccacgtgtggctggcgtttcgataagtatagccagtgatcccctccataggagccaaatagaatttcataagtatgggtacttcctctctatgtaattagccacattcactgcttcgcttatttttttgtattacaggcctctctcattataccgtattttttctaaagtacaatcggaaacttttactcacaggaaattgggatattcttctgttatttctcataggaataattaacaatctgtgtttttttggtgaagcatatgaaaagtaaacgtcaaatcatccgggctgtggggattgtgtgcctgtttctggctgcctatctggcaggctcaggcctccgccatctggtatccggaaggcaggccgtcacagccagtgccacagcagagggaaactgggggctcagcttccaggaagaaggaaaaacgcctgtggggaacgcctccccggaggatctaaaacagtaccgggcagcctttgtggatgatactcaggacaaagtcatctatcttacctttgactgcggctacgaaaacggcaacacgggactgatcctggatgccctgaaaaagcatcaggcagtgggcaccttctttgtggtggggaattttctggaaaccagcccggacctggtaaagcgaatggtggaggagggccacattgtgggcaaccatacataccatcatcctgacatgtccaaaatctccacccaggaatccttccagaaagagctgggggatgtggaaaacctgttccagtccatcacggggacctccatgagcaagttctaccggccgccccagggaaaatacagcaccgccaacctgcagatggccaaggatatgggctataccacctttttctggagtctggcctacgtggactggatccaggaccagcagccctccaaggaagaagcctttcacaagctccttaccaggattcatccaggggctgtggtccttcttcacaacacctcctccaccaacggacagatcattgatgagcttctcacgaaatgggaggagatgggctatcatttcgcccctctgtctcagctggccgagaagctgtaagttttctgtgttccaaacgggaatcttggggaccaggattcccgttttcctttacctatttggtatcacatggggattgagaagcttgatcccttcttctcccagaatggcctgaagaatatctacatattcctggaaggtaaggctgccatccggggtgagcagctcaaaatccgtgtggtatacattggcgaaaagtccggtctccttcaggccgttcctcagatagaaggcctttctcctgctgcgctccagagcattttcggcctgtggatcctgcttctcaatttcaaagataagcttataatccttgaaccgtgtgaggatctctctcactgccctgccgccccagccgccgcctcttaaggctgaggaaatggcaaaataatctaaaatcacggttttctcccagatcataaaaatcgcaaggcctatgagcttctcctcctccaggatagccaacagctccatcaagccctcttcttccagctttttcatgagctccataggctttttctcctggggcgggaaggcctcctcataaagctgttcaaactgggcggcaatttccctgcctgcatgttttacttttataaattccatgaatccatcgctccttcttctagtgtcacttcattttctgggtcttgagccggatgttgatctgtttctttccgtttctgttggaaatattctgcagctcataatcacctagggattttacaaacaaggttaatttggaaaaaccgtagtttcgcacgtcaaaatccggcagacgcttggacagctggtctcccagcatcccggaatacacccagccgtcctcatccgaaaacttctcgataatggaattgatggtcctgcggatgcgtttcaaatccttgctctttaaatttccctccttgggtttggctggggaagactctgtacactttagttccaggtgcttatctgtctcctccttctcttcctcctgctggttggagtacagaagatccagatatttaaactggttgcaggctgagataaagggcttgggcgtcttgctctcacccatgccgatcacctgcatgccggactcccttaaccgggcagccagacgggtaaagtcgctgtctgaggaacagatgcagtatccgtccacggtgccggaatagagtatatccatggcgtcgatgatcattgccgagtccgtggaattttttcccgtggtatagctgtactgctgcatgggaattatagaattctccagcagaacatttttccaggaggaaagctggggattggtccagtccccgtaaatcctcttgtaggtggcaactccgttgtttgctgtctcatccagtatgatcttaatatatttatcagaaatattatctgcatcaatcaaaatcgcaaaccttaaatcattgtcattttccattttcaccctcctttaggcttttctgccaacactggtattttcagtcacatactttattatagcctattttcaggagaattccaagtcaagctaatacacgaactgatagattcccacccagtggagcacggctcctccaagaacaaagagatgccagataaaatggctgtattttttgtgtaaggcaaaggggatcattcccaccgtgtacacgattcctcccaacaagatggtccacagcagaggcggattgttatggtaccagtccggcaggaagatgatgccgctccagcccacagcaaaatacagcgtataatgcaggcctctccactttccaggtccaaacacagcgatcatcaggattccaaaaagaatcactccccattggatacaaaaaagcacgatcccaagggtattcccccaatataccagatacagaggtgcaaaggtgcctccaataagcaggtagatggaggtatagtcaaaccgccgccagatcctttttatctttgactggcttttgaagctgtggtaaagacagctcatgagcatcataaagaaaaggctgatcccataaaagcaggaggctgtcaccgccaggccggttttggacttcagcagcaaaagcactgtcccggccgctgccaaaactgccccgaccccatgggtgacagcgtttcctatctcctcctttaccgtgagcaccgggggctcattgcgtctgagcacctgctgcctgcgctcctcctttttctgctgttttttcatctcatcggtgatatgaatttcctgttccatttttcattcctcaatttctttgtctttttataaaaagatgtcctctgttatttatgccccagctcttttgttgagaacttttaaggcgcacgcttctccctggcacaaatcaggcctgtttttctatgtaatagaaaacaccgcagcggctgatgtaccctgcggcatttcctcttacttatggtagggctcattgcaaatgatacgaaagctcctgtaaatctgttctaataagatcatctgcatgatctggtgaggaaaggtcatcctggaaaagctcagacaataatctgcccgcttcagaacctgggtgctaagccccagagagccaccgatcacaaagtccaaagtgctctttccgtccactcccagctgctggatcttttgggacagctggacggaatccagcatctccccgtcaatggccagggctataacgtaatcctgctcccggataaatttcagaagccgctgtccttccagatccttgatctgctcattcaccgcatccgccgccttgtccggggtcttttcatccggcacctggacaaattccagcctgcagtatcttccaaggcgcttggcatactccccaatgccctgggtgagatacttttctttaatttttcctaccgacagaatccgaatggtcatgcctcatagtccagtgcggtccggttacaggtaaccgccttgatgaaatccaccaccttcaggtgctcggggtgaacggcatagctttttaaagcctcctcagattccaggctggtgagcagggcaatgtcgcaggagctggaagaaagaggctgggtgagcacttgtgctcttactaatcccggaaccactcccaccaaagcctccagctctcttttcattttctgtgctgcttcctcttttgccttttcactcatatcctggcgaaaagaccacataaccaaatgttcaaccattttttcttacctcctgaaaatttaatcataaataaccgtataggtacggcttgtcaactcactttgttttccgttggcaccaatgagtatggtgttaaatgtatgggttccctccggcagagtcaccggaccgctgtacaccgtactcagggctgtgggaatcctatcaaaggcatagtaggcagtgcacccgtcaggaacccgcacactcacctttgtcttcttgtggaaggtgccctcctctggtttgatctgaggagcatccggctccttcatcaccaccacatatttcctggtgactacgttgctgggtacgtttttatcgtttacacaaaataccgatatctgggtagcgccctcagagatataaatctctccttggtatttcaggctgttctgattgggggtagtcccgtccagggtataataaatccggctgtaatccgactccacagtgagggtctgaggctgagtataggtgccttcctccagggaaagaacgggctccttacagatatattcactgcaggcatccaaaatttcctggttggggcaggcgttgagcacctcccggatctcctgggtgagcccctctccatccaaaatcttcaggtactgtaaatacacctccggactgtcactgtaaagcttcagcagaggcttgaccacaagctgtgcggattccaggtctccctgggccaccatcaccttagccagaagcagattggcatccttgctgtcaggctctacgttcagggctttttccaaatgccggtcacaggaacggaatcttcccgcctcaaatctttttactgccatttcatactggtaatcatatccattataatagcgcacaatcgccaaagaggctgccgccagcaaaaggagcatgaaaagaagtgctgcacctgcagcgatccgcctcctgcgaaaggagacagcgcttttatgtctgttgctgccctggtcctgctcccggcttttcttctgggcatgcttatgcagcaaggtttccactgagttatattccggcacccagggcacctctgtcaaacatttatggcagtataaggaacccttttccacttccgccccacatttcggacatttcatagcgtgttctcttttctagttttatcctgcttgtctatgcacattcttctatatatttttcaaattcttccatggtcataaggactttcctgggctttgtcccctcttcagggcctaccacccctgcctctgccagctgatccataatcctggcagcacggttgaatccgattttaaacattcgctggagcataccgatggaggccttctctttctcaatgataaaccgtcccgcctctgcaaaataagcgtcccgctcctcagaaccgcctcctgccgtgctgccgcccatactcacctgctgggcgatgtccgaattgtattccacagaaggattctgattggaaagaaattccaccacagcggacacctcttcatcagaaacataagctccctgaagccgggcaggtttttgatagccctggggataaaagagcatgtctccttttcccagcagcttctctgctccattcatatccagaattgtcctggaatccacccctgaggacacggaaaaagcgatcctggagggcatatttgccttgatcaggccagtgataacattcacggaaggtctctgggtggcgatgatcagatgaatgcctgccgcgcgggcaagctgtgccagacggcagatggcatcctccacctcaccgggcgctaccatcatcaaatctgccagctcatccaccacaatgacaatctgaggaagcttctccggccgctcttccccttccgggattctcatattctccaccttccggttgtagtctgccagatttctcacattatactccgcgaagatattataccggttcgtcatctctgacaccgcccagttcagggccccggccgcctttttcggatctgtgactacgggtatgaacagatggggaattccgttgtacacgcttaattccactaccttggggtcgatcatgatcagcttcacctcatccggggttgctttgtaaagaatactcatgatcaacgtattgatacacacagacttaccggagcctgtggcgccggctatgagcagatggggcatttttccgatatctgttaccaccggcttgcctgcaatgtcctttcctgcggcaaaggccagcttggaggagcatttctggaatgcctcggactgaagcagatctctgagcatgactgcactgtttgtcttgttgggcacctcaatccccactgcggctttccccggtatgggcgcctcgatacggatatcggaggttgccagattcagcttaatatcgtcagccagattcacaattctgcttaccttgaccccctgttccggctgaagctcataccgggtcaccgtaggtccgcagcttacatttaccactgtcacattcacaccaaagttatggagcgtatcctgaagcttcatggctgtattgcgcagatgctcatcagaatccccttttccttttcccccttttttcagcagggaaagaggcggaaagcggtatgcctttgccggcttggcaggccgtgcctgaatttcctttttaatatggtccaccccgtcgtcaatttcagccttggtggatttgggatttttagcagggcgggaggattctgcagccgctgccgtctcctccataggctcctgtgtatccagggctctgggcatttccacagacttggggatttccacctcctccggctctggaggcaggtcccccctggagatctgaaatgagatctgagtttcttcctccggttcttcttccacatctgtgagctctggcagcgtgagcctggtgccttccaaaaagcctgaccgggcttttttcttggaacggctcttttttcccaaggacagctcttcctcgtcctggtcttcctcttcttcctcctccaggcgtttcagctcctccagggcccgtcttcttttttcttcttttttagcttctcttagaagccttcgttcctctgcccgcttctctctctcaggtgctttctccttatggtactgagcacccttctgaaaaattccggccacccctccaaagagggcttggagaaatccgaagaaggatctctgggtcatgatgatcagacatacgatcaataaaatggtcatgagcacatatgcaccgatgacaccaaaggcagagctgaaaaccatacacagggctccgcccaccacaccgcctccggtatgaaatgcggaagagatatcataataatcctttagggtattgctctttaaatatccctctgtgagcagctgaagaaatccgcaggctaccacaaagaataaaattcccgccagcatttttttgtaggcaagcagattgctgctgttggaaatcaaaaacgccgctcccaaaaataaaaccaccgggaacacgtaagacagtaaaccaaatgctccaaaggtaaaagagctgatggcattgccgatcaatccacccaggccaaaatcactgatcaacaggataatggccgccgccaggatcaccagcagcacaatctcattgcggaagctggcttcctgggccttggatttcttggtagtcctgcggctctttgtttttttggatgttgccatgaaagtccctcctcaaatgtttatatggcaaagttcacaacgatcgccacaacgcccacagcaaaacagtaataggcaaaataacgcagctttttcttgcgcaccagcaccagcatggagcggatagcaaaatatcccaccacgcctgccacgatggctccggcaagataagaaaaaccaatggccggggtcatggaggtgcctcccagctctcccagctccaaaagcatagctcccacgatggcgggtatggacatgataaaagaatacttcactgcaaatttcttgttcatccctgacagcaggcagccgcagatggtgatcccggacctggatattcccggaaaagccgccaacccctggcagatgcccacccacatggcgttggcataggtcacctctctgggaattttctcaccggtgctcacatagtctaccaccaggagaaggatccctgtgatcagaaggccgatccctggaaaaatcagggttttacctgccatctccaccagatttctggcttcatagccgataatacccgtaggaatagtggacaccaggatcagcatgacaaatttgcggtagttattatgtatgatccttgtgtaggaacgcccggccccggtcctgcggttttccataaaccgctttccattgtcgatcacatcccacaggatagccaccgcctccagtgccagctgctttacatccggccagaaagccacaaggatagcccccagcgttcccacatgaagcaacacttcaaacaaaataccggtgttcagatccataccaaaaagtattttaaatatagccagatggccggagctgctcaccggaagaaactctgtgagtccctggactatgcccataataattgagtataaaaataccataatcttatccttttctcttcgctgtctgcgtggtgtttttaaaactttccataaaatttcactttgatttttagtatagcatattctcaaaaaatgtacaataaaagagttctgacataaattctcctattttccacaatttcgtaaacacaaacaacaacttcggactgacgaaatctcaaggccgggcacagtcttctgtgccctctttttcctgcagattccttgtcttttccggacgtttgacactcaaaatcccccaaagccttgataggcttatatttttgtgtcaaataaatatttttatattgcgtactatcgtactttgtggtatactataaccatatggatactatatcttgcggaggtgcctcaaatgcgtcttaagtacaaccaaacacaaaaaggtaaatgctactatatcatccggtcggtctacaaaaatggaaaaaacaccagtgaaacctacgagaaacttggctatcctgaagaaatctctgaaaagtatcactgcgcggatccgtttcagtggatgcaggagcatctggctgagctcaacgagaaggatcaggcaagaaaaaatcaaaagatacttgttccgtactccccctatacacgcatcccgaaaaatgagagacagtctttcaacatcggctacctcttcctgcaaaaagtttactatgagctctgcatcgatctgatagctaggcacataaccaaacggcatcatttccagtatgacatgaacgctatcctttcccgcctgatctacggacgcattcttttccctggctctaagctctctacctgtcgtctttccaaagggttactggagcccccggatttcgaataccaccaggtcgcaagagcactgtccgtgatcgcttcggagtttgactccatacaagcggagctgtataaattcagctcttgcgttgtccctcggaaaaccggtgttctctactatgactgcacgaatttctattttgaaacggaagaagaagacgccatttccaatgcgcaagccgatgccctggaaacggcagcacgcaaatacgggcacagcaagcagcaccagccttccccactcgtccaaatgggcctgttcatggattattccggcatcccgcttgccatctgtatcgggaggggaaaccgcaacgagcagaccacccttataccgttggaagagaaaatcctgcaggacttcgaactgtccagattcgttgtctgcacagacgccggccttgccagcgaggcaaaccggaagttcaacaacttcggcgagcgctcctttgtcaccacagtctccgtaaagacgatgggaaaagaactgcaggaatggtgcctggcacccgatggctggcagatggaagggagcagcaagctttataatatcgagcatttagaagataacgaaaaagatcaagaagaaaactacgacaagattttttataaactgaaatacatcgaagactatgacgaagaaagggatattgaattcaaccaaacactgatcgtcactttttccttaaaataccgcaactttctccgttacaaacgggatgggcagatccagcgcgcgatagcagccatcgaagggaaccattcttcccttgaaaagaaaaaccagcatgatttccgccgctttgtgaaacaggaagccaaaaacagcagaggcaaaaaggtgaatgtgagttattccctgaatgaagatgcgatcgctgaggagaaaaaatatgacggcttttatgctgtggagacaaaccttgatgatgatgtacccgaaattttgaagattaacagagggcgctgggagatcgaggaatctttccggatcatgaaagacgagttcctgtccagacccgcatacctaagccgggcagacaggatcaaagctcacttcatgacctgtttcatgtcacttctggtttaccgtgtgctggaaaagaaacttggggacaaatatacctgtgaccagattgtgtccactctgcgggaaatgcgcgtgacaaaagcaaaggatgccgggtacgttcctgcgtatactgcgactgatctgacggatgcacttcacgagtatgccggtttcataaccgattatgagattatccgtacaaaggcgatgcaggggattatccgtagatcaaaaatgaggtagctggaaaaagttagtacgcttttcataaaaatcaacaaatcccagaaaacatcgatttttcaatgttttctgggatttttaacgtaacaaagtgtcaaacgtgggagcatattctcaaaaaatgtacaataaaagagttctgacataaattctcctattttccacaatttcgtaaacacaaacaacaacttcggactgacgaaatctcaaggccgggcacagtcttctgtgccctctttttcctgcagattccttgtcttttccacataactaagctttgtcatcacgcaaaaattcaccaaagaaccggtccttgggggatttctggttccttggtgaattgtgcagtacttagtttgctctgtgataattcatatatttccaggtgcccggctgcccgtaggtgatctgatagccattgctgccggtttgatggaaggagggatcatacacataccactttgtgcccagcttcagctccacccatccatggtcagccaaggttccgtaggcagtgggcacgtaccccttgaccatgtacgcctcatatcccagctcccgggccatataacagaaggtggcggccttcacataacagttgcccttggaattttcaaaaccatagcaggcataccattgggtctcgctgttattgtcaggggcactctgccacaagtcctcgtagcgcatataggcagaccagtcaaaggcttttcttaaatccttccctgtctccttcagctttgctttggcatactgctgggccttagtgagcttttccagcacacctgtggagctgatgtcataataactgctccctattttgtagttttccttgtttctcacaagaattccgctgctcaggaaataatattgttttccgctgatctttttaaggcctgtggctctcacaccgttccctgccacataatacttattcttatttatggtgagccacctgcttgttgccatcacaccgttggagggctggaaataataatagttcccgttacggcggacccagccggacattcgcacgccgtttttgttcatataatactgtttgccgtcgatcttctgccagccagtgactgcagctcctgtaccgggcttaaaataatagtaattctttactccctttacccagccctgggcccggctgccatcactggggtaaagatagtaccgctttcctccaaggatcagggctccccttttctgctggccgctcttggggtcatagtaataccatttctcattgatcttggtccagccggaagctctcactccgtctgcgtcaaaataatagtattttttgtccagcttcatatgtccccggcgcataaggccagtctcaggctgaaaatagtatgtctttcccccgattgtctgaaagccctctgtgagtacccctgtgtcaggattcatataatatctggctcttccctgtactacccagccagtgagccggtatcccatttcatccaggtaatacacagagccgcctaaattctttcttccagcctcctgaagatacgtgccgtcctccattctccatcggtatccccggtcgtccctgacccagccagcctgaacctgagtctcctgttgtatattcccaaaagcccctgcctggacggtggctgtcgtctgtaccggcataagggccagcatgacaaacagcgcgatcccggtaaatttcagcttctttttcatagtcctctcctccactttcccctcaataaattcataaacaatcaggccccggaaagatacccggggcccgataagattatttaaaacttgctttttctatctgagactccgttttcagcgaaacaacacatgccggatacctacagatctttatttttcgtggtggggaattcttgcatcgatcatggctgtcaggttgtctgtgttcttcagcggtgccacaaagggaccatccggaaccactgccagcttggcatccttgcatgccagaacgccgccgtagatctcgccgatcactgcatagcggtaaaccggaagaacctggttcatctcctgagcaatgtcaactgcatcatcgtaaggcatttccacttcatatacatgagccagctctgcagctacttcccagttgttgaataccacatcttcttcaatggcctgctctacaacctgcagtctgcgctctgtgttggtgaaggttccgtccgcacttgcaaatccggttcccgggatcaccacatcggcagtcttggccagatctgtcatatgggtatcgcataccataaggaattccacatccttcaccagttctgctgaaggattctctccgaatacaaggagtgccttcacaccctccattgcctctgcgccggctgttacgcccaggtcgatgagaccctggctgttattctttgccttcagctgaaggataccgtcacgaggtttgccaatatgaccggagatcacggcgatatcagccagcagagctgctgcgtctgttgtgatcaggttctgctggaacacgatcatggctttcttggcatctgcgtaaagggcagcgatctcctttgcatcatcacaagcagccgcaccttccacactggccttaaagtcctcaaaaccttctgcgcctgcgcccttgcccatggcaatcaattcattggcaatggatttcaggaagtctaaggtattttctgtgtacacagtcttatatgcaaaacggaagttctcctgctcatatccctgaggattgatcagtaccacctttgcgccattctttgcagcctggcttaatttcacacggatcacctgggaaccgtcaaagcctgcagccaggatcacgttggtggagagaagctcgtcgatggtatttggtgatgcattcacgcccagaaccttctcaagtccgctctgtctattgttaaagcacagagttttggcgccgatggaatcagccagtttcttcatcacataagcttcttcattggtatatctgtcagagatggccactgcaactgcatccttgccgtattttgcggcaatggattctgccttcttggcagtgagtacgaaggcttcgtgataatccacttcctcaagggtaccctgggcattcttagccattggctccatgagcttgcctttttggatggcacagtcgaatccccattttcctcttccacagagaaggcctttgttcacggcgccctctttgtcaggaactgccttcaccagcatatctccgtagctctccagatgcatggagcatccaacggagcaatgagaacaggtggtgtcagtaacggtagtttccagaggcacggatttctccagaggcagattctcctgaagtgctccggtaggacagcagcttacacactgaccgcaggagatacaggtggtttctgacagtgcagattccagagccggcttcacaaccgtgtcaaatccacggtgtaccagacccagagcgcccacacccataacctcatcgcagacacgcacacaggtaccgcacaggatacacttgttggggtctcttaagataaagggatgctcgtcctcatactctaccagattcttgtcaccggcaaaacgctccggcttcacatcatacatatttgcataggaaaccaatttacattcaaagtaatccttacatccgcattccagacatctggaggcttcttccaaagcctgctcctcatcatatccgaaaactacttctgtaaagttgtcttttctttcctgggcgcttaactgctccattttcggacggcacattctctcacggtcttcaaaggaagctggtgtcaggtcgtctcttgtcacatagtactgtggcttgtaggcaatctcttctcctcttaaataggcatccacgatctcacagctcttcttggcatccccaatggattccacagcgatggagatcttgtcattaccgcagtcaccaccggcgaacacgcctgggatggctgtcataaaggtgtttttatcgtatacgatgccgccttttctggtgagctcgatcccctggatcccagaagcatttaccttctgtccgattgccaggataacggtatccacgtcaatggtcttggtctgtccctctaccggaatgggggcgcggcgtccggatgcgtccggctcacctaattccattacctgaagaaccatctgtgtgcagtggcccttttcatctgtgaggatctcaagaggattggtcaggttcaggaaaattacgccttcctcttctgcctcttcgatctccaccatatctgcaggcatctcatccttggtacgtctgtagatattgtataccttcttggcacccagacgcacggctgtacggcaggcatccatagctgtatttccgccgcccacgatggccacgttctcaccaagatcaatactctcgttgcgcacaacctttctcaggaagtcaataccgccgataacgccctctgagtcttcacctttgcagcggacaccagtggatacccatgcaccgatacctacgcagactgcgtcaaaatctctgcggatggtctcgaaggagatatcctcaccaatcttggtgttggtgatcatatgaacgcccattctctcaatgaggctgatctcttcatccaatacttcctttggaagacgatattccgggataccataacgaagcataccgccaagcttgggcattgcctcatagatggtcacatcgtggcccttctgtcttaagaagtatgccatggacagaccgtaagggccgccgccgatgacagctacattttttcctgtatctgcctcaatctccggcataaagggatcttcgccgaattcgtctgtatctgctgcaaaacgtttcaggttggcaatggcaaccggctcgtccacaagtgctcttctacatgcagtttcacagggatggggacatacacgtccgatggctcccggaagggggatcttctctctgatcaatttgatggcttcttcatactgtccgttggcgatcaggcctacataaccctgacagtcggttcctgccggacatgcctgcatacatgggggacggcagtctcctctatggttggaaagaagcagctccaggtttgtctttctggattcaatgacacggtctgttttggtgttcaccaccatattgggggcaatctgtgtggcacaagccttgcacagcttgggattgccttccacctccacgacgcagaggccgcaggcgccgtaaatctcggttctttcatcgtagcaaagagtcggaatgaaaatatcgttctctttagccacttccagaatcgtctgtccaggaagtccgaagacttcttttccatcgatatttaatctgaatttattcacagtctttccctcctattaaactctcgctacagcgtcgaacttacaagactcttcacacttaccgcacttgatgcagacagccggatcgatcttgtgcattgctttcttctcaccggtgatggctcccaccggacaatgtcttgcacaggcgccgcagcccttacatgcatcggtgatctcgtaagagatgagagatttacaggatttcgctgtacaggtattgttataaatatgatcctcatactcatttctgaagtaacggatggtggtcagtaccgggttgggagctgtctgtcccagaccgcacattgcgccgtccttgatcttggctgccagctcctgaagaagctcaatgtctccgtccttgccttcacccttggtgatcctctccaggatctccagcatcctcttggttccgatacggcagtagttacattttccgcaggattcttttctggtgaaatccaggaagaatctggccatatccaccatacaggtgtcctcgtccataacgatcataccgccggagcctacgatggcgccagttttattgatatcttcgtaggttacgcgagtgtcgatcaattcagcaggaatacaaccgccggagggacctcccatctgaactgccttgaactctttgtcattcttgataccgccgccgataccatagataacctcttttaaggtcatgcccatgggcacctccacaaggccgcccttcttgatctttcctgcaagtgcaaataccttggttcccggactcttctcggttcccatgcttgcaaaggcttttccgccgttgttgatgatccatgcaacattggcataggtctccacgttgttgatgttggtgggaagcttccagtatccctttgctgcagggaacggaggtttcagacggggcattcctctctcgccttccaaagaagcgatcaaggctgtctcctcaccgcacacgaatgcgccggcgccggctttgatacggatatcgaagttaaaattggttccaaataaattcttgcccaggaagcctttttctctggcctgagccatggcgatctccagacgggcaattgccagcggatactcagcacggcagtagataatgccttcggtggcacctgcggcaaaaccgccgatgatcataccttccagcagagagtggggatctccttccaatacggaacggtccatgaatgcgccggggtcaccctcgtctgcattacataccatgtatttctgtgctccctggttggacttgatggcattccatttaaaccaagtggggaaacctgcaccgccacgtccacgaaggccggaaaccttgatctcattgatcacatcatcctggctcatggtggtgataacttttttggctgcctcgtagccgccggttgctatgtattcttcaatcttttcagggttgatctgtccacagttgcgaagcacgatcctggtctgctgggttaagaatttcttatcctcttccgggatcatatatttttccacaggcttgccgcccatcaggtgctcttcaacgatctcggcaaccttatctgtggtacattttacatatctggcctccagtgcgccgtcatctgcgtatacgtcaacaatgggctccaggtagcaggtaccgatacatccggtcttgtcgatcacaacattgcttaagcttttctctgctacgattctctcgaattcattagaggttttcctagcaccggttgcaataccgcagctgccttgtcctacaacaactttcataattctacctcctatgcattctttgctttgtactcatccagaatttttctgactgcagctttggtcagattaccgtaagtttcctcgccgtccacggttttcaccatcataacaggtgccagagaacagcagcccagacaggccacgttgttaagggtaaacaatccatcctccgtagtctctccatcctgaattccaagatgctcacaaattgcttcttcgatcatgtcagaaccatttacatgacaggctgtacctttgcacagcatgatcagatatttgccgatgggctgtaaacggaactgtgcgtagaaggttgctacgccatagattttagcaggcatgataccggttctttcagagatgtagttgatggcatccagtgaaagaaaaccgtagatatcctgggtctgctgcaggatggtgatcaagcttccaggtaccttggcatacttttcaagtaccggagccaactcggcgaaatctgcgtttccaccgttctgacatccacacttattgctcatatgattgtccctcctatagtgaattaaacataaataacatattctactgaattatagcataaaagcggtcacattcaaagagtaaatttgagcttttattacattttgcgtttttatgggacaatatggaaaacctgcagaatccctggaatttcttgcccttgggtcttgcatatcccaaaatccctattctactttcctacattttgatgcatggcacaagggagaaagcccatgaaaaagaaacacccccgccgcccccaaaacatagaaaagcagagtagcttccctgacacaggagacttctctgcttctctcatttctgttcaaagtgaacatttctttccctgccggacctgttccggctttggggctttgatcccccgggtgattcagttcttctggtactgttcaataagctggtatagcttgcccagtgcctcacggattcctcccacctggtcaatgaggccttccttcaccgcctcttctccctccagcatggtgcccacgtctttgacaagctgggtggtgtccagcatcagctgctccagacgctcttgggtaatgttggaatggttggagataaaggtggtgatacggtcctggatcttctccatgttccggtaggtctgggccacaccgatgaacatgccgttgctgcgcaccgggtgaatcaccatggtggcactgggaaccacaaagctgtaatccgcagacacggccatgggaactccgatggagtggccgccgcccaaaacaagagacaccgtgggtttgctgagggaggcgatcatctctgcaatggccaggcccgcctccacatctccccccacggtgttcaggagaatcaaaagaccgtcaatggtctcatcgtcctccataagggcaagctttggaagcacgtgctcatacttggtggtcttgctatggggaggagcagactcatggccctccacctcaccgatgatggtgagcagctctaccttgtgcctcttgctgtttccatccaggatcacctgtcccatatccttgatctgctcattctgctcactctctgtatccagctcttgtttcttcttctcatctgcattttcatctgtctgcgcatctgagtttttcacttcttcattttccaacataaaactacctccaggtatcctttggaggtagtatgtgtaacttctatgaaattattcatcccaattgtgccatacatccgtcacatcgtcatcgtcgtccagcagatccagcgtcttctgcagatccttgatggccttttcatccgtaagctccacataggtctgggggatcatggccacctgggcttccagaaggggaacgcctgctgcttccagggcctcccgcacagcgctgaaatcatccggtgcggtgagcacctcatagctgtcctcttcctcactgaaatcctcggcccctgcatccaaagccaccatcatcagctcgtcggcatccatgtcacactcttccttgtcaatgaggatctgtcccttctggtcaaacatgaaggacacgcagcccggtgtgccgatgcttccgtttccttttgtaaaggcgcttctcacattacctgcggtgcggttcttgttgtctgtaagagtctccacgatgatggccacgccgtttggtccatagccctcataaactgctttttcatagttgtctgcagagtccgctccggcagccttcttgatcccccggtcaatggtatcgttgggcatattgttggctttggcctttgcgatcacgtcccgcagcttgctgttattgtccgggtccggtccccctgccttaacggccatcacgatctctcttccgatgacagtaaaaattttgcccttcttggcatcatttttttcctttttgtgctttatattcgcgaattttgaatgtcctgacatgattctttgtctcctttagtctctttttcttttattttctcggccctcacccgctcaatggtcttgtgctcaatggacaggaccttgaaccggtagccgttggcagcaagttcttttccaatgtcctcctctgtgggaatatggcccagcagtgaggtgagatagccgtttaaggtctcgaactccagctctccaaagctgacgcccagctcctcttccacgtcctccagatacgccagcccatcaatcagcacactgttgtcaatctgtgcctgaatgctggaatcctcttcatcgtattcatccagaatatctcccacgatctcttccaggatatcctccatggtaaccagacctgccgtctgtccgtattcgtccaccaccactgccagatgaagctttttcacctgcatggatttaaaaatttcgtggatgcccctggtctcaggtatgaaaaacacctggcgcaccagccccggaatttcacacaaaggtttctgggacagatactgattctgggtgagaatcttcatgacatctttaaaatgaacgatccccacaatgttatccagatcttcactgtacaccggataccgggaattcccctcttccagcatggaatccgccgcatccctgaggggttccatcttatcgaaggctacaatattgcttctgtgagtcatgatatcccgggcttctgtctcattgaaggatataatgttctggatcatttccgcttcattttcctcaatgatcccctgctcgtgcgcttcccccaccacggtcatgatctcttcttctgtgacttcttcgccggtcctgtgcagactgatcccgaagattcctgccgccagcctggagatccaggtgaccagaaaagtaaccgggctgaggatcttgatcattttccacacaattcccacaaagcagtaggctaccccttctgcatggtaggttcccactctccggaaggccaaaatccccagcgctgccagaagaatggcggtgacgatcaaaataaccaggactgctgtccaggtataaggtatgtagcgggtcagccgctttaaaagcgcaggaacaaaaaatgtcccaaagcataaccctgtaagtacaaccagcacgggaatacagttaatgtactggttgggatctcccatgatcttttccagctgctgtgctttcttgcttccctgagaagcctttttctccgtatcagccaagcttaaattctggaccgccgcggcaaatccataaaatatgccgttcagcagaagaattccaataaataccagactgccccataaggggatactactgccatcttccattggttttttgttaacaactccttttttctctgaatggtcttactggtaaaatatatcatcttccataagattcgtcaagaatgccttacatagtcagctccaggctcacctcaagggcatggtccaccttggagagcatctccctgtccagatggcacaccttatccttcagccgctttttgtcaatggtgcgcagctgctctaaaaggatcaccgaatccttcacaatatcatactcagaagaatcaatctcaatatgtgtaggcagtttcgccttattcattttcgatgtaatggccgcacagatcactgtgggactgtgcttgttccccacatcattctgtatgatcaacactggacggatgccgccctgttcgctgcccaccactgggcgcaggtctgcatagaaaatatcccctcttctaattaccactcaaattcacactccgattcctttcatagccataaggccttcttaccttatagtatttccagatttcttttgtgtatacatgaacagtaatgaaaaaaactcccctgttttttctgtctgctctcccatcctgcaatgccctcggggacggctgccacgtgcctgctaaagcatttgttttccatcctttatatagatcctgggaacccgtttgctgatatcgcacacaaattcataggaaaagcgtcccgacagatctcccagctgctctgctaaaaggacttcctctccgtctcttcccatgagggtcacttcatccccctgggcagcctggggaatgtgtgacacatccaccatcatctgatccatacacactcttcccagaatgggggccttcttcccatggatcagcacccagcccttattggacagacttctgggataaccgtccgcataccccacagggatggtggccacccgggtctgctccttggcaataaaggttcccccgtagcttatggcggttccccttcccacctctttcacatgggaaatgctggacttcagctccatggctggctccagccggaccacatcccgctccacctcaccggaaggatagatcccatagatggtgatccctgcccggactgcacttaaattggcctctgggatccggatgatccccgcactgttggagcagtgctgcatggggatagacactcccgcttttttcagaagctccgaaaaacgcagatatctgtctagctgcttcagagccggagaacggtcgtgctcatccgccctggcaaaatgggtaaaaattccttccacctgcagattttccagttgagaaagctccttgatctcctccacattgtccggaacatccacataaccgattctggacattccggtatccacagccaaatgtatatgtatgatcttcccctgacgctttgcctccctggcaagctttctggctgtatcaagatggaaaactgccggccggatatcctgggctaccagctgaggaaaatattcctcaaacacataccccaggatcagaatgggctttacaaagccggcccggcgaagctccagggcttcctctgccgtggctgtggccgctccccagatataaggatagtcctggatcatagttgcaatggggacagccccatggccgtacccgtcggcttttaaaactgcaatgatcttcgtatccttgtgaatattgtcccgcattgcctgaaaattatgggcaatggcatccagggacaccaccgccttcactcttttgtaatccttcatgatctctcctcttttccatccagtactctggcaagggcttcaataagatcgccggccttcatgccagcctttcccttgatcttctctgcctcttcccctgcccggccgtgaagatacacagccaagggtgccaaacagggatgactgcggtctcttcccacgcataaaagtccccccagaaaacctgtgagcacgtccccgcatccggctgtcgccatgccgccgctgccgctgatattcagataggtccgtccgtcaggataggccgtcacggtccttgcatccttcagcacacacactacctgcttctctctggcaaattcctgggctgtgcctatgagatcttctgacacctgcaaaatacttcttttcacaaggcgggccatctctcccacatgaggggtgatgacgcaccggcccttcagccattcataccagcccgggttctctgccagaagattcaggccatccgcatccagaaccactggttttttttccctctggctctctttgagaaagaattccacacgtcttctgctctcctgggcagtgcccagtcccggaccgatcaccagcacgtcgcaccagtccagatttctcttccattccttgggggtatcctccgtggcaaccatggcctccggaaacagacattgaagcaccacccggttctcttccacggtctgaatcttcaccatcccggcccccatggccagaaatcccctggcgctcaaataagcggccccgctcattcccttgctgcctgccacaatgagcccttttccgaaggttcccttattcccccagaaggtgcgccggggaaacagttttagggcagggtcctcaaaaatttgaacatcctctttgtcatcctgggcatagatgccgatatccttcacaaggacctgtccgcagaaccgggccccgggatttaagaactgtccccgcttggcaaaggcaaaggttaccgtcagatccgccaaaaacgcagttccttgcacctggccggtatccccgctgaccccggagggaatatccactgctgcccgaaaggccggggcggcgttgattttttccagcagcttctttagatctccggtaatctccctggacagaccgattccaaaaatagcatctactatagtagtatattcctcccaggccgggttattcaccattggcacatgataattggccgcaagtttcttctgaagagccgtctcttttgtcaaatgatctggatttcccacaaataagatctcactgtggaagccgtgaagccacaggatcctggcaacggcaaatccgtccccgccgttattccctgagccgcacaccaccagaactttcttcagcctctctggctccttctccagctcaccgcacaccgccagagccgcccgctccatgagcaccatagacggcatctccatattcttgatcgtgcgctgatccagttccttcattctggcacaagtcacaagctttctcatctttttcatcctctccgccgcagaacctgcctccggtcatttcaggttgtgtggcaacgtaataagagctgtctcccagcaggggaacagctccacaatcgtttacttcttcgtatgttcctcctgatattgactcaggttataggaaagagtcatcaagctctcagaaagatgtacgttttccacaatcacgtcttccggggtatccagatcaatatgggcgaaattccagattgctttaattccgttctttatcaacaggtccgccatttccgccgccttgttcttgggcagggtcagcaccgcgatctccacatggtttgccttgagaaactgaggcagctcactgagcatctgaatctcgatccctctcactgcaatcccttccagaatggggttcacgtcaaaaatccccaccagcttaaagcctctcttctcgaaatcaacgtaattggcaagggcctgtcccagattacctgcgcccaggatgatcatgggatgattttggtccagtcccaggatcttaccgatctctgcatacaaatatttcacattataaccatatccctgctgcccgaatccgccgaaattattcaggtcctgacgaatttgggatgcagtcacacgcatctttgcgcttaattcattggaggagatcctctccaccccttcttccatcaattcacctaaataacggtaataccgtggcagtcttttaatcaccgcacgggaaatttcttttgcctccaaactcgtatcctcccttttactgctacactaattatagccgtatgacattttcttgtcaattaaagataccggaagtttttaatttttcttgagttttctactttttccgatataatagaaatgtatgcaaaggaggaaccccaatgattttagcatgtcagaatatcagcaaatcctttggagaaaaagaaattgtaaaggacgccagctttcatattgaagagcgggaaaaggcggcactcatcggcagcaacggcgcaggaaagaccacacttctgcgtttgatcgtagggcagctgcctgcagatgccgggactgtggtcctgtccaaggagaagaccatcggctatctggcccaatatcaggatattcacggccatcacaccatatatgaagagctgctcaccatgaagcagcatgtactggatttggaaaaccgtatccgcaccctggaacaggaaatgaagacagcctccggggagcatctggacagcctgatgaacatctatgcacgcctgaatcacgaatttgaactggaaaacggctatgcctacaaaagtgaacttctgggtgttttaaagggcctgggctttgaggaagccgattatgagaagcctgtagagaccctttccggggggcagaaaacaagggtctcccttggaaaacttctgctgtccaagccggatatcctgcttctggatgagcccaccaaccacctggatatggagtccatcgcctggctggagaactatctgctgaactatagcggtgcggtgctcattgtatcccatgaccgctattttctggacaaggtagtcacaaaagtggtggagattgagctgggtgaggtacgcacctacaccggcaattattccgcctatgccatgaaaaaggccctgatccgggatgcccagtacaaggcctatttaaaccagcagcgggagattcagcaccaggaggcagtgatcgcaagactacggtccttcaaccgggaaaagtccattaagcgggcagaaagccgggaaaagctactgaacaaaatacagcttgtggataagccggcggagccccagacagaaatgcgcattcagctggaaccccggtgcatcagcggaaatgatgtacttaccgtggaagagttatccaagtcctttcccggtcagcagttattttccggcatctcctttgagatcaaacggggagaacgggtggccctcatcgggaacaatggtactggtaaaaccaccctcctgaaaattctcaacggactccttcctgcggatactggaaccatccatctgggcaccaaggtgcagattggatactatgaccaggagcaccatgtgctccacatggagaaaaccatttttcaggaaatttccgatacctatcccaccctgacagaaacccagatccgcaatatgctggccgcttttctctttaccggggacgatgttttcaaggagatctctgctctttccggcggtgaaagaggccgtgtatcactggcgaaattaatgctctcagaggccaattttctcatcctggatgagcccaccaaccatctggatattgcctccaaggaaattctggaggaggccttaaacagctatacaggtacggttctctatgtgtcccacgaccgctatttcatcaaccagacagccaccagaatcctggatcttaccaaccaggccattgtaaattacatcggtgattacgattattatctggagaaaaaggacgagctcacagaaaaatatgctcctgcccgggaaacctcctcccaggaaaaagaaatgtctgagaccaagctcacctggcagcagcaaaaggaggcccaggccaggagaaggaaacgggaaaatgatctaaaaaaagtagaaagccgcattgaagaattggaagccagggacaacgagattgatgaaaccctggttctcccggaagtctgtacagacgtagcccagtgcacccagctcagccgggaaaaagaagcgctggcagcggagctggaagagctctacgaaaaatgggaggaactggcccaggaagcttaaaagcgccccatccttcgggatggcggcgctttttacttctctatggggcaccctctggatctggatggcagcccctggatctctatgaggggatcctggatttatttcaggagaccttccaggctcctgcgcacctccacaatgaaatccctgctgcttaataccactggcttctttattgtggtgatcagggccagatccttggtcatctttcctgcctcaatggtggaaagaactgcctgctccagctttttggcaaagtgtgaaagagcctggttctggtccagctcgcctcgcttagcaagggctcctgtccaggcaaagatggttgccacagaattggtagaggtctcttcccctttcaggtgcttataataatgtctctgtactgtgccgtgggccgcctcatattcataatacccctggggagataccaatacagaggtcatcatggcaagggaaccgaaggcagaagaaaccatatcgctcatcacatccccgtcataattcttgcaggcccagataaatccgccctccgccttcatcacacgggccacaatgtcgtcaatcaggctgtagaaataagtaagtcctgctttctgaaatggctccttaaattcctggtactcttcctcaaagatttctttaaaccgggcatcataagtcttggatatggtgtcctttccaccgaaccacagatcctgcttggtatccagggcatagttaaaacagcttctggcaaagcttcggatggagtcatcggtgttgtgcattccacgaagaacacccggtgtggtaaattcatggatgagatcctttgtctgggtgccgtcttcaccttcaaataccagatatgccttccctggctgctgaatgtgccgctctgtattgatgtaaatatctccgtaggcgtggcgggctaaggtgatgggctttttccagtttttcacacagggctcaatgccttttaccacaatgggcgccctgaaaaccgttccgttgagcatggaccggatggttccgtttggacttttgtacattttcttcaggtggtactcttccattctggcctggttgggggtgatggtggcacatttcaccgcaaccccatacttcatagccgccttggccgcgtcaacggtgatctggtcatcggtttcatttcgcttcaccagtcccaggtcatagtactgggtgtttaattcaataaaaggcagaagaagctcttcttttatcatcttccacaggattcgggtcatttcgtcgccatccatctccacaagcggcgtctgcattttaatttttttcatgggttctctccttatctgaaatcaatctgaagctgggcgcatacctcatggatcaccttctccagctcgctgtctgtgatcacagtgacacgtccctcctcgtactgctgatctacccaggccttgatcatggcaaccatctcacagtttttgtcgatctgcttctctgccttgagacggtagtgggtattcatccagtgagcgatccctgctgcccctgaggtattggacacagccacctctacagggcggttcaggaatttctctgtatcaaagatattataaatctcttcatttttcaagaggccgtctgcgtggatgccggctcttgtaatattaaagttctttcccacatagggagttctctctgggatatggtagccgatctccttctcataatattcggccagctctgtgatcactgtggtgtccatgcctcccagatttcctcttaactgggcatactcgaagaccatagcctccagaggggtatttcccgtgcgctcaccaatgccgaacagagaggtgttcactccgcaggcaccgtacagccatgcagtggtggaattgcttacagctttatagaaatcattgtggccatgccactcaatgagttcagagggcacccctgcatgggtcatgatcccatagataatgccaggaacggagcgtgggatcacagctccgggataattgactccatatcccatggtgtcacagcagcgcaccttgatgggaatgccgtactgacggcttagtttcatcagctccaggcagaaggggatcacatatccataaatatctgctcgggtgatgtcctccagatggcagcgcacagccacgccaatctccagacattccttcacaatgcttaaatagtgctccatggcctgctttctggtcatcttcattttatagaaaatatggtaatccgagcagcttaccagaattccggtctccttcattcccattgcctttaccagctcaaagtcctttttgctggcccggatccagctggtcacttccgggaatttgtagcctctctccatacatttttccacagcatccctgtcctttttgctgtacaggaaaaattccgatgcccggattcttccctcaggtccccccagtctgtgcaggtgatcataaatggtcacgatctgctctgtggtatagggcgtgcgggactgctgtccgtcacggaaggtggtgtctgtgatccagatatcctctggcatatgatggggcacaatccggtcattgaacgcgatcttgggtacttcagaatatggaaacagatttcggaatacattgggcttctgaacatcaaccagggggtacatatgctcttccagctgcagcagattggtgtgatcgttcattttcactactcggttttccataataaaactcctcctcttgtgaatgatctgtcaccgttcccttgatggccggcaacaatcttattccacattgtagaacactttttctcattcgtcaacgcttttatacactaatgttgtaacctatagaatccgtcaatacttttcaccggaagcatcccaccaggtgtgttctgttgaaaaagaagtctgcctggcaggatttccctctggattggatttcatcagcggtacaattaagctgttttatcggggaaagccggctgcggccttcatcttctcaaaattaaaaagcccccatccctgctggtttctgggaaggcccaggtcatcggtgctgtccttgagaagcattttcacttccacattggtcagcctgggatcctgctccagcagaagggccactgccccggatatgaccggggtggacatggaggttccgctctttactgtgtacagttccgggttggcgccgcaaggggcattgcaggagatgatccggttcccgggagccaccagatccggcttgcacacgcactcaaaggtaggccccctgccagacactccctttaccccagtgagcatatcggaagagcccaccgtgatcaccttcttgctgcagccgggagccgtgatgctgcctgggcgggggccctggtttcccgcagcggccaccaccaccaatccctcatcccacacatgctccaccccttctatgagggcatcatgatcggatctggttttataggtggtgcccacagaaatatttacgatccggatgttgtacctctccttattctctaaaatccacctaaatgcctgaagcacatcttcttttttgccgtttcccatccggtccagcaccttcagggagataaggctgcacccaggggccattcctttgtattttccctgggacgcttctccgctgccccccagcagtcctgccacatgggtcccgtggccgttgtcatcataaggaaatgtatgaaaatggataaaatcccgaaaagccttaattctgctgccgaaatccaagtgtctgtaaattccggtatctaaaatggcgacacctacatttttgcctgtaatctccatgctgcaaataactcctcatacgaaaataggtctccttttaaaatattcctaaattttttttctgataaacaaacattgtgtgcatcccccggaaaaaaaagaatcctgactggcaggattctctaactggcatttatttgttttttaatgtgctgggtatcttctcttccataaatttctggaaattctcaggatcgcccagctgaaaatcagtctttttcacccagtagctggtatcattggcctttatgtaaaaggtcttctccagaggccggaactcctgaacctggttgtaggcgatggtggtaaagcattcaccccagccatactggaaggtcttggaataaaaatagaaattcgcccgcagtcctcccttaggagctgcttttaaaatctttctggtctggagatggggaagtgctataatggtcactatggagagagccagcgctgccagcaggatggcatccaacacccctcctccgataaaggaaaatacggaagaaaagccttcccctctggaagcctcccaaatgaccacagccagatacagcacaaagatcgttgcagttacaatgagactgatctttcttaaatttctggtggcgaccttctgcatctgcagaatgtcctccttggaataaatggtatgtaccttaaattctgttgttttcataaaaccctcccaaactttcttcgtctgtacgaagaaacattatacccgaaaatcccgaaagtttcaagactttccaagggttctgcccacctacattttgtcagtccgttttgttcttattcgctatggttcaatttgttctggcatatactaatgggcaagaggtgaagcatatgaaataccaaagaattcaagatttgcgagaggatgcagatttgacacagaaaaagttaagcgaaaagctgaatatcagtcagagggcatattcccactatgagacaggctccagaaatatccctgtagaaatgctcatccggctggccaactattataataccagcattgactatattgttggcagaacagaccgaaagaccttccgaaaataaatttgccgtcttttttccggcaacggcataaatttttttcatctgctgtcaaacagtccccagattgcccatgcaatctggggttttccattttaaataatgatacacaccattccgcccttactgtcattgacgatcttctgcatggtctcttgaagcttcacctggctttcgtcactgatggctgtgagcttggtgcggataccgtcctccacaagctgttcaatggatttgccaaagatattggtctcccacacactctctcctctggaaccactggaaccaatatactggatcaagtccttggcctgctcctccgttcccacaatgggcgcgatctctgtctcgatattggccttgatcatgtggatggacggactcttagacttgattttcaccccgtatttattcccctggcggatcactgtgggttcctccatctgaatctctgaaagctccggtatgacaactccgtagccgctgccccggacggattccagtgcagactgcaccttcacatattcttccttcagatgggcaaactcccggattgtatgtatcagctgatattcgctttccatggggataccgctcatttcactgagcatctgataataatattcatccttcaccgtgatccgtaccttggccacgccgttggccaggtccacagattccaaaagtacatcctgcacataaggacctgcaagctgcacggattcctttttgatgtcccggatatgtgtcatgtgctgcatcatttcccgaatctgggccagcaggtctgccttacagggatgggtgacaggaagcatttccacccatttgggaatatagaaacggatctcacttacaggaaattcatagagaaccttttccagaatcctggtaatatcttctcggcgaagctgctcacagttcactgtaagggctgtcacctggaacttctcctccagctcccgggccaccttcgtggcctcctccttatagggcatctgagagtttacaagaaccacaaagggtttcccctgcttcttcagctccaggatggtcttttcttcagcttctctgaaattttctctgggaatctctccaaaggagccgtcaccggtgaggaccagaccaatggtggagtgttcctcgatgactttcctggttccaatctgagctgcctggtggaagggaatttccttctcaaaccagggagtcttcaccatccgctcccgcccttcctccacgtgtcccgtggcgtccttcactaaaaatcccacgcagtcgatcagccttaccttcaccttcatatcttcccccagagtcacctttactgcctccttgggaataaatttcggttccacggtggtgatcatttttcctgatccacttagcggcagctggtcccgaatttccgcctgagccgcctcatccatctccggcagtgccaaaagctccatgaacctgcggataaacgtggattttccggtgcggacagggccgaccacaccgatgtatatatcgccgcctgtacgcgcctggatgtcccggtaaatctgaaaactttccatcaaaaaaagcccccttgctcatgtattgttacaatatatgccaggggggcctttcttagaccgtgtttttgaaaatgtagtatccgtccacctcgccaatgagcacaaagcggtaccttgcatagctctttaccagctcataccggtccagccgttttaccagataattcacattgagacggcgggcatagataagctccggccggatctgcgccggattggtatcctgaataaggtgatacagacgaagggcattgccattcactgcccctgccgcccgtcttccatagggcatgggaatggaagggtcatacacccgcagataggcggccacgtcatcggtacaggcggtgagcatgggggaatcctctcccgcgtctgccttaatgatctccccgatctgtgccacatggtccgggaccttctggaaattgtggactgcctcatagtttccgttcccgtacacactcctgcctgtgagaaggatcagccctgcgcacaggcacagaaggataccccgcagagccctgctgtcctgccttcgtataagggctgtaaatccataggcggtgagaaagcctccgggaaaaatccacaggagcctccagtaaactgtcccgtccccgaacttagccaaaagcttcccagtaagggggaagaaatacaccagtagaaacaccccggcacttcccaaaaagaattttctgtttttcttctcccagggtaaaagaagatagagggcacacaggaccaccagtgccagaaaccactttccctctccccagtactgggaccaggtatccagcgcattttgaaataaaccgctcatggaatcaacctcccatccataaaatcaaatagattccagctacaagagcagaagggatacagcaaaggcaggtcttcccggcccagatccatttcttatcaaaaactcccagaaccacagccaggattcccaccgcaatggggcaaagcatcacacccatagtggatacaaagcagccggaggctgtgatgcacaccaaaagcagccagggtatcccggtcttttttttctctctcagctccaggcacacatcatagatcaggggcagtatcatggctgccagaaatgcttttccctgccagatgcgcaccagctgaaaggttcctgaggtatacactgtaaaattggaaaacatctggatcaatgccagaaacagtacaaataaggcgggtgcttttctgtccttgggaaacaggctttttcccagctggtaatataccgtgtaggcagccagcaaaaacacggcaggaaaaattatatgtgccatgacagccggatgcagtcctcccgccaaagtgctcacaatggaattaaacactggaaaaggcgccagtacataccgaaggggcaggctgttatagggattacctgtgtaggggtccaccgcaaaaaccgtattggtctgcacatccgtacaggcggctgccacataaaaggaatcgtccgcatcataatgggctcccaccacagagataaccatctgaaccccaataaggaggatggccagaaccaggtaaatagacagctcctgcttggcctcctggtaccggatgggcagcttttggatcccccggcggtttctccagattccaagcacggccagggcggtcattaccacagcccaaagaagagctagacggctaagggacagcttccaccagaagatcaccggcaggatcaatagctccgatagagcgaacatccccatgtacccaaaaatatacgcatttcccagggtatttctctccttcattccagccgtaaaattcattcccaagccagtggggatcactaagagccagaagacagctaacaacaattttaatggcatctttcgtttcattccttcctgaaagtttccgggcagcagacacgggaaagagacaaggtctctttcccggccatgccgccgaatgcctgccgtataaattgccaccggcagggctggatattattttaccatacattcagccatatttccaagggagaactgtggaggaaggaaattcttactgctctgagggcattttccagccctggtggtctgtatgaagaagtctgtgggactcatgggacagcggcttttcaaaataatcctcatagcatttgagcactgcgggattttcatgggagaaccgcagattgttcacccggtccaggccatataagacctctcctctcacataagccagctcttctccgtcatggatgggctgtccgccgccgcccacgcagcctccggggcaggtcatgatctccacgaaatcatactggaccttaccttttcgcagggcttcaatgagacggcgggtattcccaagcccgctggccacagccaccttcaaaggtgttcctgccaggtcaaaaactgcttccttccagccttccatacctcgcacctggctgaaagcatccggctggggattttccttggtgaccagatagtaggcgcttcgcagagctgcctccatgacgcctcctgtggctccaaagatcactgcggctcccgttcccactcccagcggactgtcgaactcctcttcctccagatcctgtacctgaatatgttctgcccggatcatacggtccacctcccgggtggtgagaaccacgtccacatctggccccgcccctgcatcctgcatagtagggagcgcacactctttctttttggccagacagggcatgatggatacgctgaaaatattctccggctcaacccccagaagctcggcataatagctcttggccactgccccgaacatctgctggggagattttgcggtggagagctggtccaccatatccggatactgggattttaagaatcgcacccagcccggacagcaggaggtgaacatggggaaggtgtgctcctctttgtgggccaggcgctccaagaactcgctgccctcctccataatggtcaaatctgcactgaagtttgtgtcaaaaatatagtcaaaccccatcctgcgcagagcggcaaccagacgcttcacagtggcaaactcccggcttaccccaaaaggctccccccaggccgtacgcacagagggtgcgatctgtacaaccgtgattttcttagggtctgccagggcccggaaaaccccaggggtgtcatccctctctcgcagggcccccacgggacagtgggtaatgcactgcccgcacagactgcagtcagactcttccagaatccggtttccggatacatccaccgtagttctggagcctgtgttggccagatcccagatgttcatgccctgaaccttatcacagatctggatgcaccgcatacacttaatacatttctcgtaattacgcagaagtggaaaatccttggtccaccttgtatgaaacagcttggtctcatagggtacctggacaattcccaggtcattggcaaggctctgaagggagcaattgccgcttctcacacaggtgggacagttacagtcatggtgagacaggatcagcttcacgttggtcattctggccctgcgcaccttagggctgttggtatagatcaccattccctcctctgccacattgttacaggctgtgatcagcctttcttttccttccagctccaccagacagactctgcaggcaccaatctcattgatatccttcagataacagagggacggaatggggatgcctgcctttctggctgcctccagtatggttgttcctttgggaacttgtatgcttttgttgtcaattgtaagggttaccatgtcttcatcctccctcctttaaagcttccgaaaccgaaatgatcgcagcgcagacatcttcctgcctcctggcaggcttcttcctttgacatgccgcactcgataagcttaaaatccttttttctgtccagggcattgcgttccttcatcgttactcttccgcagggcacacggtcatgaagacggatcttgggaatctgcacatccacctcaatgggatgatgaaagcccaggtattcatcaatgttggctgctgccaccttgcctgccgcaatggcacggataaccgtagctggtccggtgacacagtctcctcctgcaaataccccagggatatcttcaattccgctccagttcagagccgcgatcacgcctctcttcacaggaatgccgctctcctcaaagggctctgtctcaatgccctggccgatagccacgatgatcctgtcgcaggccagccgctcctcctcaattgccgcatccttgggggcgggccgtccttttgacacctggctgataatttgtggctggatccaaagagcgttggcccttccctcctggtcatgctcaatacggatgggagaagccagctccataacctcacagccctctgcaatggctccttgtacctcctccggcatagccgtcatatctgcgatccgccggcggtacacgatccgtaccttcttggcccccagacgtactgcagagcgagccacgtccatagccacatttccaccgcccaccacgatcacgtcctggccagaaaaatccagcttctcctcatctccaatactccgcagcatctccacagcggacagcacaccctctgcctcttctccttcaatgccgatctttttatcaatatgggcgccgatggcaatgtagacagcatcgtaatccttcttcagatcctccacagatggacttctgcccacagccacgccggtctttacttctaccccgttggacagcagctccttgatctccttgtccaggatctccctgggaaggcggtaattggggatgccgtagcgcagcatcccccccagcctctgcctctgttcaaagatggttacctgatgccccataagagacagatagtaggcggcgctgatacctcccggaccgcctcccacaacagccaccttcttcccagtggctgtggcaggagcaggaattggtacctctcccccatgttccacggcatagcgtttcaagccacggatgttgatggggtcatccaccatgtttctccggcaccgggcttcacagggatgctcgcagatataggcgcacacagacaccataggattgtccttgcggataagacggaccgcatcaccatagcgctcctcccccataagagcaatatacccaggtatgtccacatttgcggggcaaagagccacacagggcaccggctggttcagactgctgatacaccggcccttaagtatgtgctcttcatagtcttcccggaagccgatgacaccctttcggatcatgtccgcagcttcgtagccgatggcacagtctgcggacagataaatatcttctgctgtctcttggatcaagtcaatggtatccagagttgcggtgccttccagcacgctctccagtaagttttgaagctgtcccagcccgatacggcacggcacacacttcccgcagctttgtgcatggcacattttcagaaacgccagggccaaatccacagggcacagtcccgggggactggcagtgattctccgctccaaatccttatagagctgctccactgtggtttgagcctgatttcttgtcacgatactcagtctgctcatggaatttcctcctctctgcctgatactggtttcccctccagtatggcaacttttttcaggttacctaaatattttttagggttgaagtacaaaaaaaggacaggaagacggcatttattgaccgttcccgtccttttctttatttttcaactaactaaagtataactgactttcacacaaaaatcaaggctttgttaaattttctacattttcgttaaaaattagtagctttcattgtgcaaaagttcatgttccctattcttcagcagatttgcatacagctcaatcaccaatgggttctcgtcagacttcttgatgatcatggtattgtctgcattgtacagacctttcattctggctgcctttgttctgtcgcctgctctggtaggctgtcctccacccatgatacatccacggcggcaggccatgacctcgatcaggtgatagtgagcttccccgttcttcacccgctccataaccgttctggcattggccagaccgctggcaacacagatattgatatccattccattataaggcacggtaaattccttgatcccgtctgttccacggacaccgcactcagagatctcacgcatagcctcttttgtatgctccttggtgagtcttcgcagaaccgcctcggttacaccgccggtaacaccgaaaatgacgccgccgccggaaccaaaaccaaatggcatatcgcaggcttccggatccaaagctgcaaaatcaatccccacattgttgatcatacggatcagctctgtggtggtgataacgatatcggtatccttctctccctttgtatagctgttgggacgctctgcctcagccttcttggctgtacacggcatgatggagaccataactgtcttcttgccctgagagttctcaggatctctgaagtattctttgatcactgcagacatcattccctgaggagaacggcaggtggacagatttggaatataatccttatattggtctgtaataaatttcacccatgcagggcagcaggaggtgagaagaggcagattctcccctttcttcactctctgcaaaaattctgcagactcttccataatggtcaggtcggcgctgaaggtggtgtcatagacttcgtcaaagcccatacggtgaagagcattgacaatcttacccataacactcttgccctttgtgaggccatagtggtcacccactgccacacgaacagcaggagctacctgagccactacgcgcacattgggatctgacagggcttcccaaacatcatccatgtgcgttttaatggaaattgctcctgtaggacagaatacccggcactgaccgcagtttacacactgggtctctgcgatggtcttattgaaagcaggcattaccatagcctcggttccacggaaggcaaacccaagggcgccgatcccctgcagctcttcacaggcacgtacacagtcaccgcaaagaatacatttattcggatctctcacgatggatggtgagctgttgtcaatgggcctgatctctctggtgttctcaaaacgaatgtcacggacgccaagtctgtgggccagctcctggagaatacattccccgctcttcacacaggtggtacaatcccggcagtgtgctgccagcagcagctctacgatcagttttctatattttttaattctacctgtatttgtataaatgaccattccgtcccttggctcttctgaacaggagccgaaggttcttcctctgtcgtcctccactgtacacagacggcacgcaccgaaggttgatacctcggaatggtagcacaatgtaggaatattgatccctgccttacggattacggacaggacattcttctcatcggtaaattcaacttttctaccgtcaattgtcatgaatcccatagtatatcctcccttctacgcttccacataaattgcatcaaagttacagttatccttacaagcaccgcacttgatacatacatcattatcaatgctgtacggatgtttgatctttccggtgatggctcctgccggacagttcttggcacatttgccgcatccgatacagaattccggattgatgtggaaggaacgaagagcagtacatacctttgcacggcatttcttatcccggatatgctcctcatactcctcacggaagcgtttcagggtactgatgaccggaaggggagcactcttgcccaagccgcacagagccatgctctgaaccataacagccagctcctccagtcgatccaggtcctccatctcaccttttccggctacaatgcgctccaggatctccagcatacgcttagtaccttcccggcagggaacacattttccacagctctccctctgggtaaagctcatgaagaaacgtgccacttccaccatacaggtgttctcatccataactaccaggccgccggagcccatgatagcgtcaaacttctttactgagtcaaaatccagaacctggtccagctgattgtcaatgagacagccgccggaggggccgccgatctgaacgcccttaaatgcagcgccgctctttaatccgccgccgatgtcataaataatgtggcgcagattggttcccataggaacctcgatcagacctgtgttttcaatggcaccagtgagggagaaggtctttgttcccggacttccctcggttccgatggtgcggaaccagtcagctccctgaagaatgatcttgggaacattggcataggtttccacgttgttcaatactgtgggtttctcccacagacctttttctactgtacggggaggttttacacggggcatgcctcggttgccttcgatggaggctgtaagggctgagccttcaccgcagacaaaggcaccggcgccacgattaatatgtaaatggaaattcactccggaacccataatgttgtcgcccagcaggccatagctttctgcctgggtgatggccatgcgcagacgtgccactgacatgggatactctgcacgcacatagatatatccatcctctgctcccacagcataggcggcgatgatcataccttcgatcatcttatagggatcaccttccattacggaaccatccatgaatgctcccgggtcaccctcatcaccgttacataccacataacgcaccttctccggctgtctggccacctgtgaccatttcttgccagtggggaagcctgcgccgcctcttcctctcaggccggatttgctcacttcatcaataactgactggggagtcatttcaaaaagggctttcgccagagcagagaagcctcccacagaaatatattcatcaatagattctgcatcaatattcccgcagttttccagaacgatcctggtctgaagcttcaggaaaggaatgtcatccggatgaggacagacctcttcttcgtttctatagaacagacgctccacgggctgtccgtttaatacggtgcggtctacgatctctttacaatcctccacctgcacatgtacatactgataattatagggttcgatacgcatcagcggtcccagctcacaaaggccctggcagcctgtcttgatcacgcccaggtgtggaatgtccttctgcatttcaaccacaactccatccacatcctcacacagcttcaccatttcatcgtaaatcttctgtgcgccggaagcgatacagcctgtaccacagcagacaagaacgcggcaagtataagagtctatcgtattccttacttcatcctgtttttttaacaaatcttctttgcaggttatgctcatatgctctcacctctcaattcttccaaaagttctacagctttctcaggtgtcatcttgggatgaaccgcatcgttcactgtcaaagtgggtgccagtccgcaggctcccagacaggatacggtttccactgtaaacaacatatcgtctgtggtgtgtttcttgtggcttaagcccaattccttcaacagtgcctctttcacaggcatggacttacgcacatgacatgccgtaccgtcgcagaccttaataatatactttccttttggttcaaaagagaagttctcatagaaggtagctacgctgtaggcctttgcctcctttaccccgatctgctctgccacataggtcagcagctccccgggcagatagcggtattccgcctgaatgtcctgcataataggaatcagtgatgcagcgttacgtccgtaacaggcaatgatctcatctgccttctcataataagactggtctaacattcctttccctccttaatttgttgtacaccgccattcacatacatttagtgaaaatgtacatttataatatcataattataccttatctcgtaaatttccacaatatgttctgtacaagtttaattattcacaatctcaaaaaaagcccgaaaatacaagggttttacaaattgtatcagaaaaaatacaataactaccccattgatttccatcacattttcctatattatgtatgttgagtgcgtaacttaaaaagtctacaaggagttgattaaaatgagaaatctcgacaccccggtaaaacagatccgaagaaaaatctttaccgaaatagccaaaattggcttttactccagtgatgacgctctgattcatgacgtggaagcgatcccctataaaatcgtccaggaacgtgccaagtatagagacagcatttacagagagcgggcagttgccagcgaacgagtgcgtcttgctatgggcatgtctctgcggccggaaaataaagccgtccatctcaccgacggcatcgaagccagcaacattgatgaaaagtattatgaaccgcccctgatgcaggtcatcccctctgcctgtgccgcctgtgctcccaacaaatatgaggtgagcaacatgtgcaagggctgtgtggcccatccctgtatgcaggcctgtcccaaggatgccatctccatggtggacggctattcccacattgaccagagcaagtgcatcaaatgcggaaaatgtaaggcggtgtgcccttatgacgccattgcccacaaggaacgcccctgtgagcgggcctgcggggtgaaagccatcaccagtgacgagcagggcagagccaaaattgtggatgacaaatgtgtgtcctgcgggatgtgtatggtgagctgtccctttggggccatctcagacaaatctcagattttccagcttgcccattccatccgggaaggcaccaaggtgatcgccattgtggcccctgcctatgtgggacagttcggggaggatgtgacaccccggaaattccgttccgctttgacagccctgggcttctccaatgtatatgaggtagccttgggagcagatatcggcgctatctccgaggcccaccactatgccaacagtgtggccaccggaaaactgcccttcctgctcacctcctgctgtccctcctggtccatgatggcaaagaaatttttcccggatatgatcggaaatatttcccaggaacttacccccatggtagccactgccagaaaggtaaagcaggagcacccagacgccaaggtggtgttcatcggcccctgtgcctccaaaaagctggaagccatgcgctccgaagtacgaagtgatgtggattttgtcatcacctttgaggagctgtgggcaatgtttgacgccaaggagatccagcccgcttcctttgaaggcacctcctccctccacgacgcaaccggagccggaagaggttatgctgtggcaggtggcgtggcaggcgccatcgaagcctgcctcaaggaatattacccggacgtgccggtgcacattgaacatgcagagagtctggcagagtgcaaaaaggttctgtccctggcaaaggccggaaagatcaagggctgcatgatcgagggcatggcctgccctggagggtgtatgggcggtgcgggcaccaatgctcccttcaccaagagctccaaggccctgaagcagcatgtgaacaattcctcgaaaaaaattcctcccaaggagctggaggaaattcagctggattaggtttcttgtaatgcaaaagcaggtgtcccggataccaggacacctgccagcatacaaagaaacctttttttgtacttctttgtatggatagattcttatcttacgatcaatttgcttttctcattgccgcttctaccacatgtccaaccagcacggaggtggtcacgcttccaacgccgccaggaactggagtaatggcatccacaatgggctcaacagctgcgtaatccacatccccgcaaagcttaccttctgcatttacgttgatccccacatcaatgatagtctgtccttccttcacgtactctgcgcccacaacccctgcgcgtccggctgcaacaatgacaatgtcagcctctctggatacggagggcatgtccacggttctggtgtggcagatggtaacggttgcatttttcttcaccagcatcatggcagctggttttccaactacaaggcttctgccgatgacaactgcttttttacctgtacagtcaattccgtagtgatccaggatctccatacaagcctgaggagtacatggagggaagccaatcttctttccagtaaatacgccgctcatggacaggtctgtcatacagtccacatccttctctgcagccagggcattctcgatcactgcctgatccagatgcttgggcagaggacggaacagcagcacgccatggatatggtcgtccttgtttaccttgtcgatcacttccagaagctcatcttgagatacatctgccggtaataagattttctcgcaggcaacacctaaagtttcacagcgttttgtagcgcctttttcgtaggaaatatcacttggattttctcccacacggataatgcacagagtgggattcactccctttgcctgcagctctgccacatttgctttaattctttcatttaaagccgctgttacttcttttcctaataactgttttgccatttctttctaccttcctttttctattatctcagtcttccaagaacgctgtcaaatgtctcgtcagcgatctttgtatatttctcaagcattgcatctgctttggcatttaactgtgccgcatattctttgtcagccatggattttgtattgatatacacattcaggctggcaccctttaaggcagctttgcagaacgcagctcccacccctgcatcgctgatggccaatgtggagccttttgcagcaaattcaacgatcacttcaattgcctcacagcatttttccatgatctccattggtacagagcaggcatccttcagaacgatctccatcactcttgccttctcagccttctcttcctcggtctgccttggcatgccgtaagcttttgaaaggggctcaaatacttctgcgtctctttcaatgaggcggaggaaatccttctgaagctggtcacattttgctttcagctcccacatctcctcttccacttctgcatatttctttttgcctaccgtaaggcttcccaccatgtttccaagggctgtgcccacggcgcccaccagtgcagacgcgccgccgccgccgggaaccggagctttggacgccaatacttctacaaattctgtacatgtactagttgaaaatcccattgtactgtctctccttatgttcattttaatggcaaattcactgccgtccgctttccagggacagcagtgaaattttcacttgatcttagaacagaccggaaatctttcctgtctcatctacgtcaattctctcagcagccggaaccttaggcagacctggcatggtcatgatctctccggtaagggcaacgataaagcctgctcctgcagagatcttcaggttacgaaccgttacttcaaagtctgtaggtgcacccagcttggtctggtcgtcggttaagctgtactgggtcttagccacacagatgggacagttgccatagcctaaggcttccagctctttcgcctgcttttgggcattggctgtgagaaccactctcttgccgccgtagatcttctgaacgatctggttcagcttgtcttcaatggagccttccagctcataggagaagctgaagtcgttgggctcttctaccagacggatgatctcttctgccagcttcttgccgccttcgccgccttttgcccatacttcggacagagccacgtttacgcccagctctttacattttgcctctaccaggtcaagctctgctttggtatctgtggggaatgcgttgatggcaaccacacagggaagcttgtatacgtttctgatgttgctcacatgcttcagcaggttgggaagtcctttttccagtgcttccaggttctcgttgttcagatctgccttgggaactccgccgttgtatttcagggcacgtaccgttgccacgatcaccactgcgtttggtttcaggcctgccatacggcatttgatatccaggaatttctctgcgcctaagtctgcaccgaagcctgcctctgtgatggcatagtcccctaatttcagggccatcttggtggcgatcacagagttacatccatgagcgatgttggcgaatggtccgccgtggacgatggccggaacgtgctccagggtctgaaccaggtttggcttcagggcgtctttcagaagggcgcacatagctccctgtgcatttaagtcccctgcagtcactggtttctgctcggaaacctttccgtatgtataaccaacgatgatcctggacagtctttccttcaggtctttaatgtcgctggacagacacagaactgccatgatctcagatgccacggtgatgtcgtagccgtcctcacggggcattccgttggtctttccgcccaggccgtctaccacgaagcgaagctggcggtcattcatgtccacgcatcttctccaggtgatctttctggggtcaatgttcagggcatttccttgataaatatggttgtcgatcatagctgccagcaggttgttggctgcgccgatggcatggaaatcaccggtgaagtgaaggttgatgtcttccatgggaactacctgagcgtatccgccgcctgcagcgccgcccttcacaccgaataccggtcccagggatggctcgcgcagggcaaccataacgttcttgcccagcttctgcagtccgtcagccagacctacggttgtggtggtcttgccttctcctgcgggagtggggttgatggcagttacaagtaccagttttccgtcttttttatccgtctctcgaagtaagttatagtcgatttttgctttgtacttgccgtactgctccagatacttgtcgtcaatccccgccttctttgcaatctcagtgattggcagcatttcgcactcctgtgcaatctcgatgtcagttttgaatcccataaaaattacctcctttttccgcaataggtattatttttttatgtataacaggttcccctgctaccatcttgtcagaacttctccattgcttttaacgtaccgatgatcacatctcctgtgacagccatatcctcggcctgaaaacacagggggaaattatcggaaaacaaaatctgggaggacggcggaaattcttcatccccctcccacaggatcagctgtacaaacaatcccggaagcagctccacctcataggcgcagtctccaaacttcacaggacgggctcccagcttttccatgatctcccggaatttgctcaatttgttcccatagctgtaggccagacgcataatgcaccgcccgttaaactggcgcagatacacatctccccagggtgtctctctataggtgagaaattttcccccagatgaggcggcagatgcctccagcatgtagcgcaccaccaggatttttgccttcaggatttcctccagaggccgaaagccttcctccttgtcctgatgagatacctggaaatccgggaaatgaacctgatattcctttcccataaaaccaaccgtaaactcctgcttctcctcattataaggaaagcctgtgcggtgggaaatctcctggggatctgcctgggcaaaacgctccatataatgctcccagggttttctctccagattatccttgtcataatttaaatcgtccaagttaaaagccatgtggtcacctcagaattttaaaatttactgttgtcatttatctatcttcccagccgctccatcacagagggaaacagggtagaatctgtatgggggataaagcaggctcccacaaactcatccatatagctgggaactgtggacagctccagataggtcatattccctgccagctcataggttttcttttccgccggggtagagatcagcattgcataagctccgcacagggatgaattcccaatataatggaatttgtccagagggatatccgggaacatgcctatgttcaccgcattctgcatattaatgccgcttccgatcccccctgccacatacacatcatcgatcatggacacatcaaagtccagggatgccagcatagtgcgcacagctgagaaaatagcaccttttgcacgcataaagttgtcgatatccacttctgtgatctccacatccttaacggtgccggcttcctcttcaaaggccagcacatagcttcccattccatactcatcatgctttacccgcttcccttcacggacaaacttgcccttgggattgatgatgccggccatgtaaagctcactaatcacatcaatgatccctgagccgcacagaccgatgggcttggttcctggttcgcccaccacctgaaatacaggctccatggtttccctgtcaatggtgcaggcttcaatggctccatctgttgcacgcattccgcagctgatgtcaccgccctcaaaggcaggacctgccgaacatgcgcagctcatgagaaagtcagaatttccaaataccagctctccgttggttcctaaatcaataaacagagaaaactccggcctgttccagatcatgcttatgagggtaccggccgtgatatctccccccacatagcttcccacattgggtgccacgataatatgggcatccggattaatatgaattcccacgtcggaagcaaacagggaatttgttttaaagaatgcaggaatataaggctccgtacgcagtggatctgcgttgattcctgcaaacagatgattcatagttgtgttggatgcaatacacatcctgtatatgctgttggaggagattcctgcgcttttgcacatctgtttcaccataggattaatagtctcctgaatcacagcatcctgaagtttctttcttcctcccggcttctgctgctctatgatccggttgatcacatccgcaccatagcggatctgcccgtttccggaagaggcctttgccaggatctcaccagtttccatgttaatgatcaccgctgatacggttgtggttccaatatcaacagccaatcccgcgatcactacatcctcattcttatcacatacgtcgtagacaaacatatcattggaagttgtccgaagaacacacttcactgaaaaattactggcccgcagcacatctggaagttttctcaaaaccctgtaggggatccttaccatcttaatatttaaaaacttcctcagagccctggcaagccgctcattgtccggcatggtatcgtccagactgggaggggtcatatctacctctaccacatccaggctgttccgcagctggatacctgcaaattcaatgttgctttttgctttttcaaaaatggctatctcttctttggagcttaaatccgcaactttcatgcggcttttataagcggaggcaatgtctggcacaagcacggttacatccgcacaaatcttgctcacacacgccagtctccatccactatcatactcctcctccgctatatggagggtcttttttgattccaattctccgctttttaactgcacccggcacttcccgcaggagccgtttccggaacagggggcatcaatggccacattggcctctctggcaatatccagaagagtatctcctgcatttgcaaatgtctccacagcgcttccgtcctcgaatgcaaatgttaccttgaacatccggcaaccacctttctccatagcctttattagtcagacagagatctttctctcttgcatttattgaaaataggggacctggggcaaagcccgaagtcccctattattctgagcacctctgaaaactctccgaaggggacgactttcagagccgcatctcaatcattagatttccagataggaatctgcatacagtgtattatttttgaagatatcacaggatttgatggtttccatcaatcttaaatcacagggatttacgatggcggaggtcaggccctgcataatgcacatagcaactaaggttgcatccatgatgggacggatatgcttaggcataccgttgctgttgttggacagaccgccggtggagttcaatcccatgtcggagaacattttaatagcttccagaacttccatctgcttgtcctgcattccctttacaaccaggaataaggggtcaaaccacagatcagtaggttccatacccagcatcatgcctctttccagcatgttctggcagtgcatcatacgctcatcattgtcagcggcaataccttccgcggagcaaagagcgatcacgatcgcgtcattggcagcagccaggtcgatgttttcaattcttccgcctgcatctgcagagtttacgattggttttccttttgctctgttgtatacagaaataccagcctcgatggcttttttattagctgtatccagtgccagaggaacattatcaaagttttcctgcagcagctgaactgcccatttcatcagatcttccccgtcgttctcagcaggtccgatgtttacgtccagataggttgcgccggcatctaactgctcttttgctctttttaagatcggctccggatttctggtagccatagcgtcacgaataacaggtgagatacaatgaattctttccccaattgttacaaattttgccatactcgttctcctttacgtttctttaattcaggcttatgcctgtaaatctttcatgaatttcacaagctgaactgcttctcttggtccaacgatcacttcccatcccggaagttttgcttcaatgtcacccttcagtacagctacttttcctgggataaccagttttctgcatttcactttcggctctacttcttcctgaatgaatttggcaatggtgctgccggagaacttacctgctgcccaggaggtcagaacggataatccgcctgcatcgctgatggtcaggttgcaaggtacgccggaacgttccagctcaccggaaacaacgaaatatgtaagtgcaaagtcaaccgttgtaagaacaacagagttctcatcagcgccgtttaatggataaataccaggctcaaccttcattggcttctgaggatcggtgaatacgttctggcgcaggccatataagggaagtgcctcagcgtaggtgatctgatccataacaacgatggagccatatttcatggtaaatacagaagctaaagctgcctgcatatatttgtcccctgctgcgattctggtggtatcaacgatggagggataaccaaaggttctgtcctcatctttgatagctgcacggcggaccaaaacggcattgccaaaggtctctttcagattctggccggtaacatccagaaccaggttcttgttgccggatttctccaaagctgccactgtatcgtaaagctcgcttaagtcttttccggaaacgcccagaacaacacctgcctctgtggctgctttgctcattgcttcatagtttcctgcatttgcgccgtttaagataggtttcacatccttgcatacagccagtgcctctgcggcaacctctgcatctgcgcagcccagtaccaggactttgccaaggtcttttacttttttgatgatctcaaggaagttatccttgtgctcaccgcagtaatcaacgtaaacagcctctacatgcattctctcactgatacgctcataatccacggtctgaagctctgcgatcttagcgtcaacagcagcagtatccatgcagcagttcagttttacagcatatcttgttttgcttacaaaagttttctcatgtctgtacagtacagtctcgccgcccatggtgatctcggcatcgccaacaccagctttgatggttttcattggcggagcagttgcctcggacagagaagccagagcttcttcagacatatgtggacactgctcgatctgcattgcgccctgtgcaactttcatagagaaagccatacacgttgggcatccacattccttacagtttttctttggtgttaatttaaagatctgaataccattcagtgccatatcttcttcctcctattctattacacgagttctttgatcattttggaaatggttgctacagactgaggatgtcttaaaataacggcgtcagagcctgataccaggtctgctgctgctgtcatgatctccatgtcgatcccacggtcttcctgtggtccccattccggcatatcttcttctgaagccatggcttcttttactccccatgtctcagaagcaactggtgtaataataggcatctgcagcatgttatcattctgagataaagctgcacctttaatacggtccatggtagatacaacatattcatagccgtatcctacactggcggtaccaacgttcataacgatcttctgagcgtttacacccaactgagtggtaataacattaagctgctttgcaaggttaatatctactgcagactctgcacctacgatctggtcgtaagcaagtcctgctgcagcaccgatagctttgtagttctcttccttctcagacatgatcagaacatttctgccctgaagagcctcagctactttgggaagaagctcagaatctttctcaacattcttgcttccctcaactactaacggacagtcaacggcatctgccacttcctttacaactgcaataagctcttcaacagacttgtctgctccattgggatctccgccttccagataaagagcaacaaaatctgcgccttccacagcggctgccttctttgctacttcacccatgttggcgcagtctgcataaaaagctttgataccttcagaagcgttctgtcccatatcagaaatttcaatacctacttttggtgcgttttctgtgggagcgtcaaaagtgtagaatgggaaggtgctatttccacctaaaactacagttttgtctccgcttccgattgtgactgtgttaatctttgcattgaacttttgtggtttctgattaaacggcatttctcgttagcctccttaaaaatattaatttcacacgcatattccgcaaaataagcgcatagtaactgttattattatactacatcatcggctccattgacaaggcaggatggttatgttctgtcaaaaatgcaaccaaagtttccggatctgtggcaatggtctcatcccctaccatatctgtgaaattctcgattccatacagctcctgggcagttttgttgagacgggctgcaaccgtgtccttcagttcctttggcatccagacgatacgctcaattccgccctctgccttcataaatttcctggatgcaataaaatgctttccgtgtcccataaatccaggtgtctgcacaccgccgccggtcatggaagccatctccgggaaggtcattcccagaggggtcattcccgggtattcccggttggcgataacaacaccgttggaaaatggttcaattccgcagatacattcaaaacatccgcaggaagtcattggatcctgcataatggaatacagggtaactctctccagggcaccctgggagaattttttcactgcttcattcacatcttcataggctcccagctcttcgtcaatgggccgctcctttgtgatcacctggcagggacctgccgggtccagttcatttgtggccttagcatccagccaggatacagcgccgcaaagtcccagtctctcaggagtcaccacacacacatgggagggtgaaaatgcctgacagagaatacagctataatacacatccacagattcatccgtgagtgtttccagtctggcatctcttttgtcaaaggtgggaacagccacttcatggcgaagtctgctgcactgtgccgggtcagtatagacggtcacctggcatttgtccaccactgcttcaaactcgttttttacctgggcatagagcacctctgcaaaatgctttgcacggaatccggcctgaaaggcttcttttccgatacggatacggagcatatctctctgcccggtatggtatacaccctcgatgcagttaatataattgtgaaatttacgctcgatcacaggctcaaagtctggctgcatcttcttgcccgccacttccacaatataagcaatactgtgcttgcttccttcctcaaaggtgtctacttccggtccgatcacctgaattttatggtcctccacttcctccatgggtttggtctgaaccagctcacagcagtccacgcgggaaccatcgaattccacctgcatgtccttgcggcggatgatctccccctcaaaggctgaggcaaatgccacaggaatgtcaatattagttattttgatcttaatatttctggcttccagagaaaccttattaaaatcagctacattggggcatggaatcagcgcccctggtacctccacaatattttcatcttcattggagatcactggaaatcctaatttaatggcccctgcgcccgctgccaggatcacatcatccacaggcttaaaggcatttacaaaggcaggaactctctgggcagtataagccaggaggcttgcagcatcccccggtgttacattaccaaagatcaaggcagcgcgaagagctacggatacaacatgaatgacagatgtgacatctttacccaatggcacgatacggacgttgtatcccatcttcagtcctttttcctgggcctgatcgataatcccgcctaccagggtcaccaggattccctgggcctgataactcttgatcagctccaccccttcctcaggtgtgggggctgaccctaaaatcacagctactcccggaatgtctcctgtaaccaacggcactcccatttcacggatgatagaatccgcaagatggccgtagcaaggttcactgtatggcactgctccgtctatatatttcagggcttcgataaactccgcacacagagcagtggcaactccggacatgagagcatcttccagctcatgttcccttgtcatcagactcttcacaactcccagcgcctctttcatctcccctaaggttttcacctttactccagttacagagtagtagcagggaaggcagtaagccgtatgaggaaatcccacagccttgtctgctccatgctggtttatggcattgtccactgcctctgcggtcaggccgaatacagcatcatttccgttaaagattctgttaatcaacatctcctagcatctccttctccttttctgcttcagcagaaaaagattcttccattgaaatttagtggaagcaatcatcctggaacaaatttcccctaacgtgtcagaatggattgtttcttataaaccgctgggaaatgccgaagcatttcccttagcagttacatttaaattttctaaaattacatcattggttccaggctcagtgccggatggcctttttcggtaaggaatgctaccagggtctccggatcttctgctactgtctcatcaccgatcatgtctgtaaagttatcgatgtcatacatttctttagctgtcttatttaatctgtcggcaacaaactctttcagctctttgggcatccaaacgatacgctcaataccgccctctgccttcatgaatttcttggagctgatgaagtgcttgccgtgtcccataaatccaggagtctgtacaccgccgccggtcatggaagccatttccgggaaggtcattcccagaggagtcatgcctgcatactcacggttggcgataacaacaccgttggagaatggctcgataccacagatacactcgaagcatccgcaggaggtcataggatcctgcatgatggagtacagagtaacgtgctccagagcgccctgagagtatttcttaactgcttcatcaacatcttcgtacgcacccagctcttcatccagcggacgggtctttgttacaacctggcaggggcctgcaggatccagctcattggtagccttggcatccagccatgaaacagcaccgcacagaccaagtctttctggtgtaacgatacatacatgggaaggtgagaatgcctggcacaggatacaggtatagtatacatccaccgattcgtcagtgaggttagcaagacggtcatcacgtttgttgaagatggggatggccacttcatgacggattctggtacattctgcaggatctgtgtagataacaacttcacatttatctacaacggcgtcaaactcatttttcacctgggagtacagaacttcaccgatatgtttcagtctgaagcctgcgttaaaggcgtcaatgctgatacggatacgctgcatatcacgctgtccggtatggtaaacaccctcgatacagtttatgtagttatggaatttacgctcaataacaggctcgaagtcaggctgcatgttctttccagcaacctttaccacataggcaatgctgttcttgctgcccagatccatctcgtccacatccggacctacaacagtgatcttgtgatcttccacctgggtaagctcgtaggtctgtacaagctctgcacagtctacacgggaaccgtcgaattccacctgcatgtctttacggcggatgatctctccttcaaatgcagatgcaaatgccacaggaatgtccacattggtaatcttgatcttaatgtcgcgggcttccagggaagtagcgttgaactcttccaccttcggctgtttgatcaagctcttgggtacaaccggagtgtaatccatatcgttggtcacaaccgggaatccgtagtagatcgcgccagcgccgcaggcaacggtcttctcatccagaggtgcaaatgcatttacaaatgcacggaatctgttgaaggtatattcctgaagggctttcttgtctcccggtttgatatttccgaagatcatggctgttctgcaggctgcagatacggcatgacatacagaggagatgttctcgccgatggggaatacacgtacattaaagccagtcttgtatccagcttctttcagctgttcgatgataccgcccaccagacatacgaagttaccctgagcctgatagcttttaaccagtgcacaggcctcttccactgtaggagctgcgttgatgataacagcaattccggggatatctccagttacaaggggaacacccagctcacggatctgggcatctgtcatatgacctaagtagggctcttcatatggcttctgtccgtccacatatttcattgcttcaataagctctgctgacagagcggtagctacgccgctgttgaatgctgcatccagacggcggtctcttttcataatgctcttaatataggtaagagcttcttttgcttcttttaaggtagtaattttggttcctgtctcagcataatagcaagccagggtgtacgcggtgtccggaaagcctacggctttgtcttcaccatatttggcaatggcatccgttactgctttttctgcttctgcatacatgctgtcatttccattaaatacgatatcaaataaaagcactgtcatacctcctaatttatccgatcattgacgatctatcttatctttaattttctttatttcattggttaccgtttcactgaaatcgtagggcgatcttccctgcctgtcggcatcaatgacttctgtattgtagtggatcatgcccagaaggtcctcctgggggatcttggacaagataaatgcctcgtcctcctcattacgcaccttattggccaccaccttcacctggcccacacccagatccttggcaagacgcttcacgttcttgtaggtctggacacttcttgcgcccggctcgatcaccacgataaactcatccattccttctgtggtgcctctgcccagatgctccaggccggcctccatatccaggatcaccacatcttccctgcgaaggaccaggttgctgataatgcgcttgagcatcacatgctccgggcacacacatccggcaccgccggtttccacagttccaagaaccagaagccgcactccgttgcagacctttccgtatttctccggaatatcgtccaccttagggttcagctggtagaactggttcgacgcattcgcccctgttcgttcttccaccagctttctcatcttggagatgggaacaatggaatccagggtttcctcatcaaacccaagagccagccctaagttggcgtccgggtccacgtctgccgccaggacaggccgtccctgagctgcataaagccttgccagggtcgctgcaaatgttgtcttacctactccgccttttccggttactgcaattttcataatttatcgcgcctttctacatcagtcctagtgggaacgcctggaacatctgtattagatgcccagagcagctctcttctcttcgatcttgtcgatcatcatatcgcctaatttgtcaatatcatgctctacggtatagcatgcttctacccaatccttaatgccgcccttcagaaggccgtcaactacagaggaaccataagcgtatggctcaactccaagataggtgtcaataccggttgcaactacatagttaccaatggaaaccgctttttcagacatccactcaggagcacatcctaccagcgggatctgggaaatgttccatccggaatccttggcgatccttgccgccagaaccatcatacggctgatatccacgcaggatcccatatgaagtacaggaggaatgtccaccaattcacagacacgcttcagaccagcgccgcagaattcttttgctctcttgtccataaggccggcttttgcagcagcctgtgcggaacatccggatacaaccaggatcacgtcattggcaatgagctttttcatcagttcaatatgtgcagcgtcaggacgtaccttggggttgttacatccaaccatagctacggcaccgcgaagaacaccggatttcacacaatcaaccagaggcatcatggttccggtcacatccacatggctgtttgttacagtgtcaagtttcttctcgatctgctctacagagtagcccacaacggctttctgtttcatatcaggtatgtaaaccaggtcattatttctgttcttaaagttttcaatagctgtcttaacgatcatcttcgcattctcagccgcggtctttgcattgaatctgatgaaatcagagtctggcatctgggcaataggagatgtggtgatgaatttggtgtggaagcatttggacagtggtccaagtgccgggaaaatacactgcacgtcaacgatgatggcttcgcaggcaccggtgagaacaacgttctcctgctgcaggaagttacctgccataggaataccacggcgcattgcaacttcgttggaggtacagcatacaccagatacggtgattccctgagctcccatggattttgcatagtcgatcatttccttgctgtctgcatattcgcagatcatctcggaaaggctgggatcatgtccatgtacaacgatgtttacgttttcttttaccataacgcctaagttggcttctgtttccacttccttaggagttccgaaaagaacgtcagagaattcggttcccatcatggagccgccccatccatcagaaagacctgaacgcagagactggcggatcagagcttccggcagggaggaacatcccatatgagtcatatgcatagagcaggaaacttctctgtcaatggcacgtggacggatctcttctctgtcccagatctcctgtgtatgctccggagcacgttttgtaaacacctgggttccaaaaggttttccgtattccataaggccgacttctgcaacctcatgagcgatatcatagatatctctgccctcggtggcaacaccgaactcagcggcaagacgcataagcttctcaggatcttttaccttgtaagctccgtctggagatgcctcatgaagggtatgggcgatctcacggccatggtcagagtgggtagcagaaccgcctgctgtgaaacgcagatagtttcttcctacaataccatgaacatcacagccacagatacctttcggagcctttggtgttacacggcagggacccatggaacagatccggcagcacacacctgactcaccgaatttacagtgtggagtttggtttttcacacgaagctgccaggaatcagcacctacttttgcacctgtctccaaaagtctggcggtagccgcttcaaattcttccactgtagttaatttgaattcactcattatagacctcctttaaattttgcgcgcacattggcacactttgtctttatgatgcttaaataatttatctaaccccgtagaaaggaacaaatcccatcccctcccatgggttattaacagttaaaaaaatctagtcccattcacacaagtatcccttaccgcccacaggcggcaaggggtaccttctttataaatcaagctggtccacgatctggtggagcgccttctttaccggattgtcgtcgggcagggtcaccgttgcctttcccgcacaatcatactcatataccatttcatcctggggaaccacacctaataagtgcaggccctgaagctcaatttcttctttgatgccctcattgagaactccccctggggcacggttcactatcaatcctacggttttgggatgcatctcgcattcctgaataagcttggcgatacgccctactgcctggattcctctccttgaacagtcgctgaccaaaatggcggtctgcatggtaggcagcacgccccggctgatatgttccataccagcttcattgtccaccacaaaataaggataactgttctggtatttcgccagctgagcctgcagaagaccgttcacaaagcaatagcagcctttcccctgggttcttcccatcaccagaaggtcaaagtccttatcctcagcaagggcatcctcaaaacggaactccgcataatcagccttagacattcctggaggaatggggttgtccgccgccatctctgcccgggcgatctcctcccggacctctcctaaggtagtctccacctttactcccagaacttcattcagattggaattagcatccgcgtccacagctaaaatagggcctttccctttttcgcagagatattggatcaacattccacacaaagtggttttacctacgccgccttttcctgcgacggctattacatgtgccatataaaaggcacctccttcaagttttactatttacactgaatcttcacaatactgttggccagatccaccataagaagctttccctccacaatggtttcctcgcccataatatctctcaggatcagcctgtctccatccacatcaatgcggctggtatttctcaggatgatggaatcatcctcctgcttatatacagtagctaaacacataacgaagcctcctttaattaagccccagttcttccttcaccaggttcagggcaagactcaggcgcatgtttcctttctggaaatcagaaacgccctccttaatactcttggcagcggcatccatgcctaatttcaccagattgtctgccatctgatccagctccatggcgtgatgctcattgtgctgcagcatgtaggtgagcagagccactgtctcatttttgcagtccttgccagagcaggagccgcagtgctgatgatcaccctcctggcaggtgccgtgggtgtggtcatggttttctccatgctcatggctgtgctcatgagtatgggtagttccgtccgtatgtgtatgttcatgattgtggccgtggccgtgagccaccagattgccattctcatctttgattaaatgcatgttgtttcccctttcttttctgagggaatcttcataaaattcctacagatagacttatgacaagaatttatcaattgcctttattatacaacgtttcgcctatcttatcaaggcaatattctaagattttcttcaaaatattcttcattttgtacagaatgaccagtaatttgattttttcgtttttccgttaacgatctcgttattggattaacgatttacagtaccaaaaatggtagcaaaattgtaacagaatcgatgttcttctttcacaattttgtgctatactaaagtgagtttttgttggagaaggaggaatgtatcttgaaaactaccgtttgtctcaacacaaacagagaaatgcccctcttgggtttaggcgtctataaagcaaccggcaacggagaagtggagcaggcgatccgctgtgcagcagatgccggctatcgtctcattgacaccgcttctgtatatcagaacgaggacggggtgggccgtgggatcgcctcatgctcagtcccccgcagggatctgttcatcaccaccaaggtgtggaacaacgcccagcgcctgggggatattgaaggagcctttgagcggagcctggagcggctgcaggtggattatgtggacctgtatctggttcactggccagttcccggctgttacccagacacctggaaggttatggagaagctctacgaatccggacgagcccgcagtgtgggcgtgagcaactttgagatccgccacctggaggagctctccaaatattcggatctagtgcctgctgtgaatcaaatagagttccatccctactggtatcaaaaggagctgctggaatactgccagagcagagggattcaggtccaggcctacgcacctctggccagaggcgcctatctggacaatgatatcatgtgtgttctggccacaaaatatgccaagacccctgcccagatcgggctgcgctgggcaattcagaagggcgtggccgtgattcccaagtccacccgccaggagcgtatcattgccaacggcgatctgttcagcttcgaaatccaagaagaggacatggagatcattgacactctgaaccaaaattacagaagcgcccatatccccgaagatttaagagacgtggcattctgataacaaaggggcccggctgctttgtaggccaatgcccagatgcaaagcagctttcctgcgcaataaaaaaccgctgcctcactttgatatgcccttgtgtacttgacaagggacacatccctgcggcagcggtttttcaatttttttgtttctttctaagactctttattcttcccagggaagcatgggtgtctccaccttcttatccctgagcatcagatccttcactgcctctgcagcagcttttccctcaaagagcactttgttcacttccgcaataataggcatttccacaccgtatttctctgacaggccctttgcggcttttgcagaatatacaccttctacgatcatcttcacctctgccatggcttcctccatggtggccccttttcccatgagatagcctgcctttcggttcctgctgtggacactggcacaggtaacgataaggtctccaatcccagaaagcccgtagaaggtctctgccttggctcccatctccatgcccagacgggcgatctccgccatgcctctggttataagggcggcctttgtattgtctccataacccaggccgtctgccgtccctgccgccagcgcaatgacattttttaaggcgcctcccagttccacgcccagaagatccggggtggtgtacactcggaaaacagggctcatgaaaatcccctggagatattctgcagtagccctggttttagaactgatcacacaggtggtgggcagtccccggcccacttcctccgcatggctggggccagaaagcacggccacatccccgttgggaatctcctgttcaataatctcgctcaaggtcataagggtgttctcctccaccccttttgccacattcacaattttctgtccgtcccggacatagggagccatggaggccgccgtccgcctggtaaacggtgagggcacggccagaaccgccacatccggatccacgagacatttcttcagatccgtggtgatctccatatcccggggaagctttacccccggaagcttagaagcatgctctctgttcttggtgagcatctccacctcatcctccaaagcagaccataaggttacctcatgtccattggtagaaagcagcagagaaagggctgtgccccagctcccagctcccagtacactgatttttgccatataaccacctactctttcttcccgctgtgacccaggaatattttattttctgtgcccttgtacagacggaccatattggctctgtgacgatacaaggccagaactgtcaaaaacgccatcactccatacatttccaaggtatgggccccgtccatcccgtaatatcccagctgtccgaatacgatcatacacacgaaggacaccacataagcgctgatggagcacagagacacataatgggtcgtaaaaaagatggcaaaaaatacaactgccgcaatgatcaaaattttccagtcaaaggcaatgagaaggcccactgaggccgcgatccccttcccgccccggaagtttagataaaagggaaaattgtgtcccaaaatgcagcccgcagccgcatacatgctcagcagaggaagtatttccctgtgggagtctgcgaagatagctttggcaagcaaaatggctaatacacatttcaggcagtcccccacaagggtgagggcgcctgcctttttcccaaaggtacgcagagcgttggtagtccctgcattcccgcttccatgttcccggatatctgtgtgatgcacctttccaataatgtaggaagtctgaaaaagtccacacacatacccaatgagcaagcaaaaaatcctttccatgactattccttctctcctcgttccctgataataaactttaaagaagttccacgaaagccaaaggcctcccggatcttattttccagatatctggtataggaaaaatgcatcagctccttgtcattgacaaagaccacaaatgtgggcggacgcaccgctacctgagtcatatagaagatcttcaggcgctttcctttgtcagaaggcggctgctgcatggcaacggcttccgagaggatttcattgagaactccggtctgaatccgaagggtctgattctcaatgaccatgtcaatggtctcaaaaagcttctgaacccgctgtccggtcttggcggagataaacaccagctccgcgtagggcatgtaagcaagaacctcccggatccggttggtgtgcttgtaaatggtcttgtcatccttttcaatggcatcccatttattcactgcgatgataacgcctttgcctctctcatgggcaattccggcaatcttcgcatcctgctctgtaacaccttctgtagcgtctatgagaagcaccaccacatgggcacgttccaccgccgtgacggtgcggaccacactgtagcgctcaatctcctcttttacctttccttttctgcgtaggcctgcggtgtcaatgaacacatagtccttcccctgccacttcacctttgtgtcaatggcatctctggtggttccagccacatctgagacaatgacacgctcttcccccagcagcttattcaccagagaggattttcccacattgggtttgcccacaatagcaatatgaggaatatcctcctcaccctcctcctctgcagattccgggaaatgtttcaccacctcgtccagcatatctcccagcccctgacggttggccgcagagatggcaaggggctccccaatgcccaggttataaaactcatacacatccatcatatatttctggatgctgtccactttattcaccaccaagatcacgggcttgccgcttctgcgcagcatgtccgccaccttggagtcagagtccaccagcccctggcgcacatctgtgataaaaatgatcacgtccgcagtgtcaatggctgtttgggcctgctgacgcatctgggacaggatcacatcctggctttccggctcaatgcctcctgtgtcgatgagggtgaaggtgcggtccagccagttcacctctgcataaatccggtctctggtaacgccgggcgtatccttaacaatggagatattctctcctgccagggcattaaacaatgtggactttcccacattaggcctgcccacaatggctactatcggtctgctcatatatctgtctcctttttttatttccggcgcttccccggccaagtacagccttcaggaaatcatctccgccggaatctacgattagaatcggtacccccagtacctgctccagttcttctacggtcatatcatccagaaatacattctccccgcttcgcagcatgttgcaagggagaagaagctcctctcccaagggacggcccataagctgttttttcagatccccgcctgtgatcaggccggataccgtaatcctttctccaaaaaactcatttacaatgggatacacctgggccgacaggcccggctgctgctcctgtatctttttcagcagcatttcaatatagggtgcgggcaaaaggccagtggccagggaaatgtgtctgtgcacagcctccccggtgccttttgcaagtgcctgctccacttcatttaaaagaagggtgagcatgcccactccgttttcaagctgcagataaccatcatacacctcttccccagggagcttgcgccccgccagtatataccactcatccgaggcatgtacgaaatgaatctggtgcttctccatcattctctgctgccattcccggaccagatccagcacctggcaggcgtcctcttggtcaaaaggctccagaggatacagtccctcacgaaatttggtgaggcccacagggactatggaaatgctctccagcaccggggcataggcagccagcttctccaggctgtactccagctccctgccgtcattgactcccttacacagaacgatctgtccgttcatagggatacccgcctcatatagcctgtccaccttcttcagggcatctcccgcaaagcggttgtggagcatctgacaccgcagctgaggattcatggcctggaaggaaatattgataggccccagatgataatgaatgatccggtctatatcatggtcactcatattggtcagagtcacataattcccctgcaaaaaggaaagcctggagtcatcatccttaaaatacagagtctccctcatcccaggaggcatctggtcaataaagcagaaaatacatttattggagcaggaacggtattcatccatgaggccgttttcaaattccagtcccaggtcctcgtcatattccttctccacctccagctcccacacttctttgtccggcttctccaccagcagcaccaccgtctcttcattggtcaggtactggtagtcgaaaatatcctccacaggcttgtcgtttatgcgcaggaggacatcccccggctccagctccagctcctgtgcaatactgcccgggagcactctggaaattctatgttttttctctctcatttttcacactccattttaagtctatcctatcataccaattttatgggtaaaaatcaataaattccttgacgcactttgtggcaaatgttataaatgtagataggttgagtgataagtacataggaggattattatgcccaatatagaattactggaaaaatctcttcctgtagcccccattaaaattgccgctctggctggctgcagagacctcgcagaggaagttgataaaaagctggtgaaattccgtagagaattggtagaacataaaaaagaccagtttgggatcattccccaggggtattctgagaaatcttttttagtggactgtgagtgcccccgtttcggcacaggagaaggcaaaggctacatcaaagaatctgtccgtggagtggacctgttcatcatggtggatatcaccaattacagtctcacctacacggtatgcggacacgagaaccatatgtcccctgataatcattatcaggatttaaaacgcattatttctgcggccactgggaaagcgcaccgcatcaatgtgatcatgcccttcctatatgaaggccgccagcataaacgttccaaaagagaatccctggactgtgccctggctttaaaggagctcagcgacatgggggtgtccaacatcatcacctttgacgcccatgatcccagggtacagaattccatacctttaaatggatttgataacttttttcccacctaccagtttttaaaagccctggtgcgcaatgttccggatttccgcctggacaatgaccatctcatgatcatcagcccggatgaaggggccatgtccagagccgtatacttctccaacatccttggtgtggacatgggtatgttctataagcgccgtgactattctaccattgtaaatggaaagaaccccattgtggcccacgaattcttgggggattctgtgaagggcaaggatgtggtgatcattgatgatatgatctcctccggggaaagcatgctggatgtatgcaggcagatcaaagaacggggcgccaaccgggtgtttgtgtgcaccacctacggactcttcacagacggcttcgacaaatttgatgactactatgagaagggatacctgtaccgggtgatcaccaccaacttaaattaccggaacccggagatcttccagaagccttattacattgaagcgaacatgagcaaatatcttgcaagcatcattgacatcattaaccatgacttatctgtggaaaaggttcgttccagcaacgacaagatcatggatctggtgcggaaatacaacaagtaaaacctattaaaaacctttgtaagcgctcacagccggcagcataaaattgcgccggctgttttttcattcccgcttctgcataagcgtcactgctgaatctcttttctcagccccaggaaggctgccagattgccccttctgcccttggaggctctgtgagaaaacaaaagctgcggattgcagcaggtgcacagacccgccatagagagatgctccgggagcacaccgccctccagcaataccagctcgttggccttccataggttcaactgatattttccattttctttgggataatacagggactcccagcagctttctggaaatgcctcctgaaaagcctggatcacatccaggcttacctcatagcagtcctggcagatggagggccccacggctgccagcacatccctggggtctgtgccatattcccggctcatggcctccaaagtcacctttcccatttttcccaccgtccccctccatccggaatgggacaggccaatggccttgtgcaccgggtccaccaggtacaagggcacacagtctgcatagaaagcagccagcacaagccccggcacgttggtgatcatgccgtccacatcctggaaagtccggggtctggtgatcccgtttcctctgtccttttgggtgatcacccgcacattggtggtatgtgtctggtccgaggtcaccaagtcctccacagaaaagccaatggcctcagcgatccttctgtaattctccctgacgtcttcctccttgtctcctctggtaaagctcagattcatggaggcataaataccctggctgacccctcccaatctggtggaaaacccatggactaccaggttggtctgttccagtgccgggtaagtgagataacacaccccgttcttctctctcacattcattttgggtttctcttccctgtaccattttatttccatcaatattttttcctttccctgcagtactcaaatgcattttttatccaggacagcctgcccttctccactccaatcacgtcaaacctgcagggaaggtcctccctgccctgctcctttaatagataataggcggcagcccggctgatcttcctttgcttttcaccagtgacagcagcgaagggtcctccctgggccggacctctgcggtatttcacttccacaaataccagataacggccgtcctgcacgatcaaatcaatttctccctgacggcagcggtatttcctggccaggatcttacagccctggtttacaagaaaggccgccgcctgttcctcatagcagtctcccacttcatgggtattcataacctcacctgatttctttgtccggtatggttctctttggtggactcaggaaacaaaattattaataaagctccttctgtgtatgggacttggaccatatgttctcaatgcatcaatatgggcctgggctccgtatcccttgttggaggcaaaaccatattctggcatgagcttatcatactccaccatcatccggtctctggtcaccttggcaacaatactggccgccgctatggacatactcttagcatctcccttgatgatgggaacctggggaagggtaatcccggggatggtcacagcatcgttcagcaggatctgagggctcaccgccagctggctcaccgcctctctcatggcctcataggtggcctggagaatattgatctcgtcaatacgctggggactcactaccccaaggcccacggccacagcctcctccatcaggatctcatacagctcttctctctttttctgggtaagctttttggaatcgtttatgtacaaaatcccgcagtccctgggcaggatcacggcgccggccaccacaggcccggccagaggcccccggcccacctcgtcaatcccgcacacatacccaagatgctggtatttccgttcatattccttcattttctctgtgcgctgtttctccttttcaagggcctcccggcgcttttgggcctgggccaggattttcttcacccctacccggggatcctcctggtattttctgcacagctcccagagctgttcctccccggcctgttggaaaagtaccttaatctcacttaatgtctgcatgttcttgtatacatccttcctgatgctgttttatttatcctgctcctgatggcaacatcataccacaaatctgacaaaaaaagaagccgcttggcggcctcctttatccatatatttaccttgactgggctgtgcactggccggcatttgtctcttctaaccacagggtgcaccggccggcttaaagttcctgcggccgctccagtgtgatccttcccagcttcccgctgcggaaatcatccataaggatcccagccgctttggtgtaatccagctcctcgccttttttcacacagcctcttgccctggctgtctgttccaggatctccacagccgttccctccccggaaatgccgtagcggtccttcagcgcctgaggatactcctttttcagaaactcgatcagattcagggacagctcgtcaatgtttaagatatcatccttgatgctgccaatgagggccaggcggatacccacctgctggtcctcaaatttgggccataaaattcctggagtatccagaagctccgtccccttgtttaagcgtatccactgctttcccttggtaaccccgggtttgttgcccgtctttgcgcaggctctgcctgcaaagctgttgatgaaggtagattttcccacattggggattcccaccaccatggcccggatgggacggttcagaatgcctctgcgcctgtctcgctcaattttttccctgcaggcctcctggatcactccctggacagctttcactcctgccccggtcttggaattcaccttggccacaaagaagcccttttccttaaaatacccggaccaggcctcatttcttctctcgtctgccagatccgatttattcagcaggatcagacgggccttgttcttcccaagctcgtctatatccgggttcctgctggacaggggcacacgggcgtccaccagctcaatgatcaggtcaatgagcttaatgtcctcctgcatctggcgttttgccttggtcatatgaccaggataccactgtacgttcatagtcacctctaattcttcaaaaatcctatcttcttcaccggagaaaccgaaaaccatagcttcccctcaatatatttctttttcaccttgccaatatcaccatagcggctgtcctcactattattccggttatctcccagaacaaagtactctcccgcctccaggcttaccggattggtggccaggcctgcactggtcatgtcctgaaaatctcttccctctgcatactcttccccattaatgagaatctttccatttttaatctggatgatctctccgggaagaccgatgacccggcggatatgaagggcggcatcgtcactgctgttggtcttaaaaacaataatatcccctcgtttcggagaacccaccttatatataaaacggttcatgaaaaacttgtcccccacagagatagtgggttccatggcactttcctgcatggtcactgtctgaaacataaaaatcgccaccatcacggaaaacaccaaggccacaagaatctcaaaaacccagatcatgatcccccggaccttttgatttttcaaggtctcctttgtgctttgcagggtttcctttgtattttgcagaagctcttttttacgctttttgccttcgattttgcttttgaatttcataaacacctctgttcctgcggcattttcctgcctgagtgcctatttcttcatcttaggaaggatggaaaaacagggacaagatacgcaatgtatttgtccctgtgatcatccgaaacttcaatttacttatctaaccagctcttttaccttagcagccttacctacgcggtctcttaagtagttcagtttagcacggcgaactttaccgcggcggacaacttccacatttactacatgggggctgtgcagaggccaggtcttctcaacgcctacaccgttggaattctttcttacggtaaaggtttctctggtgcttccgccctgtcttttcagaaccgttccttcaaaaatctggattctttcacggttgccctctttgatctttgcgtgtactcttacggtatcacctacgtgaaactccggtacttctgctttcagctgagcagcttcaatgtttttgataatttcgttcatgtttttctctcctattctttgggatgttcttaatacgtctatcactcgtaacagcggaccatctttttttcacaacatgggtaattatactataagagttccctatttgcaagagtttttttaccagcacagaacctctgccccatcttttgtcaccagcacctgaatctcccattgggcagagggcatgccgtcctttgtgcgcacggtccagccatcctcttcgtctgtataaatctcgtccccgcccatgttcaccataggttcgatggtaaagaccatgcctggcaccataaccattccggaatggggctgggatacatagcttacccagggatcctcatgaaattccagaccgatgccatggcctccgatctcctggaccactgtgtagccgtttttcagagcgtgctcatgtacagcatggcccatatctcccagggtggtccagggcttcaccatggacaggcccacctgtacacattcctttgtcacatccaccagccgtttcttgtcagcactcacttctccgatacagaacatccgggaggaatctgaataatacccctgataaatggtggacacatccacattgatgatatccccctctttgagcacttcctcctgggaggggattccgtggcataccacatgatccacagaggtacacacgctttttggaaagccttcatagttcaggggcgccgggatccctcccctggacacggtctgctggtggacccactggtcaatctcctgggtggtcaccccggccttgatatgctctgccacatagtccaggaccgcaacatttattttcgcactctctttgatcccttcaatatcctcatcggtcttcagaaggtcatggggaggcagaagatatccctcatgctccatcttggccatctgctcgtccacagcctcgtggcattttttatacttcctgccgcttccgcaccagcagggatcgtttcttcctatctttaacatggtctgtcttcctttcttcattccctgcctattttactacagcttttttcaacaatcaaccttataaaaaacaaagcaggcaagccagcttcaacaccccatccctcactcatgcggggcttggcagctttgtgtgccaaaaaagcagccggtgtgtattgacaacattaaaaaatcgggtatcctagtatttatatattttaccaagagatacaggaaaggagtttttccatgggatattccctctacgagctcttatggctcttctttttttattcttttgccggatgggtcatcggcaccggcgccgctgcggccagggaaaagaaattcattgacgttggttttttatatggtcccttctgccctgcttatggctttggaggcattgccttctccatctttttgccggagttaaagaacgaattgttctttctgtttgcaggaggcctcatcctctcctctgtagtcacctatgggactggctttgtgctggagaagatctttcacagaaaatggtgggattattcccggaaaaaatttcaatttgaaggctatgtaaaccttccctatacggtggtgtggggtattgcaggagtgctgtgcatctgctttgtgaatccctttcttctaaacgccatcagcctgattcccaccaacattggaaatatcctgctgctgatcatttaccttgtcaccgcggttgattttatcagctcctccatggccgttctggctattcagagtcgtcttagaaaaatcgtatttgtggaggagctgtctgagaatctgcagaagactgctgaccagatgggagccggggtaaccggctgggtcctaagaaggattgagaaggcctatccccgcctggctgccaatgagcttctggccgccagacaggaagaggaacgaaaaaaagaagcagccagggaaaaggccggagtcttcgccgttggctgcagcttttacaagctggtaagtctgtttttcctgggggccttcctgggggacattacagaaaccattttctgtctggccactgccggaaaactcatgagccgcagcagtgttgtctatggacctttcagcattgtgtggggccttggctgcgcccttctcactgcagtcctctatcaatacaagaaccgcagcgacagctatattttcctctttggcaccattctgggcggagcctatgagtacatctgcagcgtcttcacagagctggtgtttggaaccgtgttctgggactacagccatcttccctttaacctgggaggaaggatcaacctcctctactgctttttctggggaatcgcggcagtggtgtggatgaaatggctctatcccccgctctcccgcctgattgaaaaaattcccaggaaggttggtctgcctgccacttgggtgctggtggtgttcatgaccgtcaatatcatcgtgtctgctctggccctgaatcaatacaatctgcgccatacccaaccggaaaaagcgcccacggccgtaagccgttttctggatgaccattttcctgacgaacggatggaaaagatttatcccaatgcaaagctggtggaatcttaagactggacaagcatctatcagggccgtatatttttcggccctgacttagtatttctttcaccctatatccaagagataggatcatatcaaggttatagtgaattccgcacagttcaggtaggaggtcacatgaggatagatctgcagcttccggtggagggctgtcaaaaagtccctgagcagtccggattctctgcaggtttttcgcaaataatagatgatccggtccggaggcggtgattccaggaaatgtatggaaagcgcaccggaagctgccactttgtgggcttctaccgagggctgggtttggtgcagattccggttctgggaaccattctccatatcagcctccgggtcctactctcctattgtctcatcaaacctcttgggctgtctgccgttgcattggccacaggagccggctggagtgcagtagtcttgttccaatggcttctctatggccgttattccagacgggctgctccttaggagaaagccccctggtcaagcctgggtatctcttaagcgctccacaatgctctctttgctggcgtgggcaaatcccctttggggtaccacacaggcaatgatgataaaaagagggatcatgatcacaaaggcccatgggttatactgatagtcgaaaaacaaaatcacctggttcagtgcacgaagaattccccaggacagtacacttcccaataggatgctgatgccggaggcgatcaggacataatacagtccctcctccagaagcatcctttttaattgcttcttggtcattccgatactgcacaaaatagcaaattcctgttttctggaaaaaattcctgtgagggtagaattgataaagttcaaaatcccaataaaagcgatcaccccgctcatggcaattcccagtgttccaatactgcgggtcattcctgaaaactccccttttaactgttccttggatacatagcccatgtaagggcttatattttccgtatagtcctttgccacagcctggaaattttccagagcatcctcttccagctcataggatatggcaaagcgagtgggaagaatagaattttctattaaatcctcaacagaaaatacgtaatccacttcatttgtattatagagatgtttgtccatagcgtatgggatatccaccactgccatcacctcaaactcctgcaccctctgattttccataattactgagagaacttctcccttttcatcctttatttctttttgcttggagtcttctgtgacaaatcccatctctaccttatctcccggttcatataaaaaacaattcccagacttgtctccctgaacaggagtcaccagaatataaccgccctgccggaatttctccaggtccagttccccctccagaacacgaagattttttaaaaggacctcatcgtaagcatacctggttccccccagccttcctgtgcttaaccgatcgtcaataatttctgaagagaaggtgtctgctctattgagaagccctttttcatcaaaggttctatatttattcttctgctcttctgtaagatatacctcgtcaaaataatcactgcaccacatctcacctctggtgcggattcccggctggttatccagtatagctgcataatccggatccacttcaaaatcataattccgcaaagaggaggtgtaatttatagtcccagccgtcacatctcccaccagccgttccttgagatagctgtcgatctgaaagcttcccagagctgtgagcaccacacacagaaggaccacactcaggctcatggacagaataacaaaaaccgtcttcttcttattccttcccagattggataaggccattgcatgaatcttcgccccattttccgtcttcttggcttttttccttttcatgctcccttctgtataacgcacagcctctactggagaaacgctgccagcgatctttcccggtctgcggcagctcacagctaccgtaagcacactgaagcccgcggcaaaaataaaaatggcaggatgaaagtgcagggagatcttcatccctctcatatccagcatacttgttgcgatggggaacagcaccttgctgattccataccccacaaccagtcctacagggatccctgccatagataaaaggaaggcctgcctgcgcaccagacgccggatctgcttttgggtagtgccgatggtttttaagagcgcatagaaccgaatgtcctgcataatggaaatttggaaaatattaaaaataatgagatagccggtgaggatgatcactaccaaagctcctgccatgagaaccacagttcccacatcgatctgctctgcacggttctgcatataagcccagttcacgccgtactccacctgttgtcccggttcatagcccgcatccttgataatggatttcacggtatcttcaatatttttcccactgtcaaaatacaagcccactgcataaaggcccactgcaccgtcctgtagatgctccttttgccattccttaaaatcctctgttgtccagtccttcttcagcttgttccagtaggactctgctatataaatctgtgaggcatggccgactccgtctccctcataccatccacagaccgtaaaggtcttttctattttctctcccttgaaataaaaggtgagaggaaccttctcccctaatttgtggggaagcttcagttcgtccaggataaaggtatctacaaggatatcctcctcattccttggcatctctccttccttcagggtgataaaggaattttccaattccttggtatttggagcataccgaatctccccactgcgctttaagatattctccgccctgctcacaaaaatattccaggaaaagtccttaactctggggtcagccgtgatcttgtccatctcctcctgggtgacccccttgaggcctgcatggtacttcccacccacttctctcatggtctgttcctgggaaatctgcatcatacccacgcccatagaggccagtacagtgaacaaaatgcaggtaagtgctatggccccggtggcaaagagattgcgcatacggttgctgcgaagacccctgttggataattttgtgatcacctttccattattgtttctcataatctgcctcctaccgatctcccactatttttccatcttcaatatgaataattctgtcgcacagctgggccagggcctcattgtgggtgatcatcacaatggtctgattaaactggtccccggtaagcttcagaagccccagtacctcctgggtagttttggtgtccagatttcccgtgggttcatccgccaggataatggccggcttgctggccagagctcttgcgatggccactctttgctgctggcctccagagagctggtttggaagactatcctttttctccagaatccccagcattcccatcacgtccaaaataaattccttatccggttcctctccgtccagttcaatgggcaggacaatgttttcatacacattaaggactggaaccaggttatagttctggaacacgaaaccaatatttcttctgcggaaaatggtcagatccgtctcattaagcttaaatatgtcctttcccgccacagccacactcccggaggtggcataatccaggccccccagcatgtgaagaagtgtactctttcccgacccggaggtccctaccactgctgcaaattctccctcctctatggtaagattcacaccgtccagagccttcaccagactggcgccggatccgtaatatttctttagatctgttgtctttaagatttccataaacagcctccttttctttgatacccttatcctatcaccaaaatctgacagccttctgacaccgtggaaaaaagttctgacaaaattgtcatatgagacaaatccatcaagaactctccgtataacttgataagaataaggcttacaaaggcggggccccataggtttaactgtacaggaagctttgggcgctggtctcattgagaagatatacatgaaaacagcttccttttcccacccgggaggtgacggtgatgtatcccttctcctggttcaggatcagctgggccagatacagacccaggccgcttccctcctgctgctccacctgcttccccctgtgaaaccgtttgaagatctcattatattcccactcctccatccccaggccctgatcctggatatcaatccgtgtataaatctccatgggaaacagcccgatggtgatcacggaagcttccggggaatatttcactgcattttccagaatattttccagggcctctgccgtccacttaggattgtgatagagcctgcgatcctgaaattcccgggtgaccacagtgatccctttctcacttgccctggcatatactccgcccactgccatggccacggttcccttgatccctgtacaggccacaggaaaggacaatatcccctgctccagtctggaggccttcagcagatttttcataagccactgcattttctctgtctgtacccgggtctccttaagaaattcctgcctttcccggacacttaggttttcctcctccaaaagctctgtgtacatgataatatttgccatgggcgtctttaactgatgggacaggtcagacaccagggctgccacctggtctctctcctcctgtgccttctcccgattcttgcacacactgcccaaaagccggcttagacggctcaccagcttggattctctggtttcctttgtaagggccagattctgcccctggtttctctgaaaattatccaggatcttttccagccttttgatggagcaggtataatagaccagcacccccgccgctgccagaacactaaggatcgcaatccccccacacaaaaccagaagccatctctcagtcatgacgctcctcccacaaatatcccattccatggatggttttaatataccggggcttggaggcagactcctccaccttcaggcgcagacggcggatgtttacagaaagggtattttcctccacgaaggtgcctcccatatcccacacatgctccagtatctgctcttttaagagcacctgatttttattttccagaaaatacttcagaagacgaaattcagtgagacttagatccagctcctgttctcccttatatgccttcatccccgcctcatccatgcggatatccccggacacaagcagccttttggcttccccggccccctcataccgcctgaaaagggcactgaccctggccttgagtacagccagggaaaatggctttggtatatagtcatccgccccgcattccaggcacatgacctcatccatctccatatctctggccgtgatcatcaatataggcacatgggaaaactccctgatcttcctgcacagctccagtccatctccgtccgggagattccagtcaagcaggatcaaatcaggaggtgtctgccgcactgccccaattcccttcgcatatcccgggcagcactgcacctgatacccttctctttccatagtaaaggccatccctcttgacaggccttcatcatcctcaatgatcaaaatcttcacctttttctacctcctgctgcctcacagtttttcacaagtatagcattgttgtccccctatggcaacccgcagtccatgcttgtaccaatccttccaaagccccatccagctgaatgtttcattccacccatatgaaaatcccccatccatttgcaaccataaatggatgggggatttatctaaacggccgtgaggggaaaatggttcatggcttatttgttttcagtgattcgactctccgccttttgaggcaggagattcctcacttattttgttaaagggtatttcagaaaaataggtatttctcacagccctatttagatcatcggtattcttctcagccatcatattgtaaatctgctcatgggcttcgtataactcatcgccctttcctgtctggatcagagtgtccacggtacgatgtctcactgcataggtgagaacccgcaccacctggttgattttgtttaccagagggttctttcccatatcacagatggtatcgtgaaattcattgtccgcctgaaaaatattctccacattgtctgagcccttattaatttccttttccatgtgactcagcttttctctgagaagctgcagatctgctttctgtgcttttttcatagccagcttcatgactcctacttctatgagctctcgcagctccatgagattctcataggaatcctctttgtccaaaataatgccatagatcatgggatcgatcatgctctctgagaaaccttcacacacaaaggtgccttctgccctgcggatttccagcactcccagataaaccagaatcttgatagcctcccggatggaatttctgcccactcccatggactgcgccatctcggactctgtgggaattttatctccagggcgcagttcccggtttaacatagcctctgtgagaacattgatcacctgctgcacaacggattcactgcttactttttttaaataactggcatttttcattcttctcaccccttatcggttaatcctacaaccaacatactaccataaaaagcgtgatttgtccatggctatgttgaaaaacagggggtgacaggcaatccaaagcttaatccatgtgagaaccgccgttgatgtcaatctcctcgccagtaatataagaagcttccttagatgccagaaatacaatggcgtttgccacttcctgggtctctccgggacgtcccatgggaattccgtcaataatcttgtcagcatcctccttgggaagggacttccagatctcggtgttgatcaggccggggcacacactgttcactgtgatcccctctgcagaaatctctctggaaaggttcttggagaaggccagaacggctgccttggatgcagagtaatgagcgcctccgaacacacctccaccccttttaccggatacagaggacagatttacaattcttccgtatttctgatcacgcataaccttcatacatttctgggtacacaggaacagtccgaacatatttacctcaaaaatcttcctcatatctgccagcgtcatatccgcaaccgttaccttctgagagatgccggcattatttacgagcacatcgatccttccatattgattcatcacatcgtcaaccatcttctgtacagacgcttcatcggtaacatttaccgtcacgccgaaggcctctccgccctctgcctggatctcctttactgtctcctgtactcctgcctggttcatatcagcaatgacaaccgctgcttttaagcttgcaaaggtttttgctatagtctttccgatcccttttggtgagccgcttcctgttacgatcactacctgtccgtcaaattcaaacatgatttttcctcctgaaatttcttttcttaattatttttttatatttgatcttatgaattttcttttcttcctgttttgttagctctcttccttttagccttttatgggccttctatttcctgcccaggccttaattctttttcactaattcctttgctgtggccaccagattgtctacggtgatgccgttcatctccagaagtctttcatatggggcagactgtccgaactgatcctggataccgattcttttcaccacgcagcttcctgtctccacagccacctcactgactgcgcttcccaggccgttcataatgttgtggtcctccacagtgatgattttccctgtgtcattgacacattccatcacggcttctgtatccaatggcttaatggtgtgcatatccagaagctttacagaaatgccagcctcctccagctccttagctgccttcagggcaatggatacggtgtccccattggcgataatggaaacatccttaccttccttgagcttttttgcttttccaatgacaaattcatcctcttctgagtagattaccggaatggcatctctggtaaaccgaagatatacaggcccgtcaaactctgcggctgctttcaccagcttcttggctgcataataatccgcaggcatgagtactgtcatattaggaatggtacgaagaactcccatatcctcaatactttgatggctggctccatcattggccggagttacacccccatgggagcaggcaatctttacatttaatttgggataacagatttcctggcggatcatctcgcacattctaagagaaccaaacaccgcataggtcactacaaaaggaatctttccgcaggtggccagccctgctgccacgccggcagcattctgctctgcgatccctacatttaaatactggtccggaagctctgcgcggaaggctcctgtcttacaggatttgccaatgtccacatccaccacatatatgtcgttatctattttgccaagctttacaatctcttcaccaaaaccatctctggtcgctttctttacttcgctcattttattctcctccactgattttctatatatatctgtgtgttcctacaaaatcctgccgttcccggtaaatttcctaactactgtctgtcctgtctttcgattccgttgctaataaagcctctttctgcagttctcttgtatcttcccattatgcagacattctccccgcaatacgctgcagctgctcatccagctccttcattgcctgctggtactgctcctcgttgggtgccactccatgccatccacactggttttccataaaggaaactcccttgccctttaccgtatttgcaaaaatacatttgggctttccgttctttgtcatgcggatcctgtccagagtgtccacgatctgcttcatattgtgtccgtcaatttcataggtgtcaaagccaaaggcctcaaacttcctgccaagatggatgttgggcattacctcatccgtgatgccgtccagctgcagattgttgttgtcaacaaacaccaccaggttatccagctgatatttatgggcagtctgggcagcctcccagatctccccttcctggcactccccgtctccgactaccacaaacacacgatagtccttcttatccttctttgctgcaatgcccatgcctacaccgcaggccagcccctgtcccaaagagcctgtggagatatcaattccagggcatttcttcatatccgggtgtccctgcaggatggagccctcctggcgaagggtatccagcatagactcgtcaaaatatcccagtgtggccagcgccgcatactgtaccggacacacatggcctttggacagtacgaaccggtctctgtcctcccattttggattcttggggtcaacgttcatctctctgaaatacagggctgtgacaaaatctgccgcagataaggagcccccgggatgtccggatttggccttataaatcattttgataactttctttctcagctggatgctctgtctttccaattcttcaacacttacatttttcataatcgattcctctccttcttaaaagaataacaatgatattttgggtatgtaggttaccagcagcaaaacaatcaatgctgctatgatcaagcttactaccgccttggatatctgcttcaggttgatgtttcccaccccgcaggccacgtacaggttcacccctacaggaggtgtaaaaagaccgatggccaggtttacgatcatcaccacgcccaagtggagaagatccacacccagggcctgtgccacgggcacaaacagcggagtaaaaatatataacgcagaagtagaatccaggaagcatcctgcgataagcaggataatatttacaataatgaaaaagatgatcacatttccgcctgtggccttctcaagagccatgcttatggccacgtccagtcttgctctggtgagcacataggcaaacaggctggctgctgctgttatgaacatgactgtggctgtggtggaggtagtatccagcaggatggcgtagaactccttcagccgtattttcttatagacaaagattcctacaaacagcccatataccactgccactgcggctgcctctgtgggagtgaagatccctccgtaaatgcctcccagaatgatgaccggcatcagaagtccccaaaaggcatcccgaaaagctttccaccgctcttgtcccgttgccttgggaagggtcttcaaattcgattttcttcccaccagaagggccaccaccataagggccacacccataagcaggccgggaaccaatcctgcaaggaacagatctccgatggaggtatcggctatggagccatagaccacaaaggttattgagggaggaatgataacgcctatggctcccgccgctgccatcagtgctgccgaaaaggcaggcttatatccagatttgatcatcgccggcacaatgatgactcccagggcggccactgttgcggggccggaaccggagattgccgcaaagaagcaggcaacgatcacacagacaatggcaagtcctcctcggatatgtcctacacaggactctgccaattttattaatttttctgaaattcccgctttttccataatatttcctgccaggataaagaagggaatggccaggagcacgaacttactggtggatgcggacacaatcatgggcagactgctcatcactgtatccaagggtcttcccgctccctggatgatcatggcggccacactggagattcccagacagacagctatgggtgtccccagaaaaagcaggagggcaaaggttataaataaaactgctgcaaccactattggttcacctcctcatttggatttcttttaatctcttccactagcacctgaataaaacggaatgtggcaaaaaatgctccgataggtacaaaagaaccaaagatccactccggccactgcatacctgccgtaacctgccccagaagcctttggtttttcaccataaggattccgtaatagaaaattgccccggtaaaaagtactgccgcactatagccgatgatcctcatcaccttctctgcctttggccccactgcatccgtgaggatgctcagtcccaggtgggcccggcgcttggcggcaatggctgttcccagcatactcaggagcacaaataaatacgtggtgatctcctctgagaaggagaaggatgcactaaataaatatctggcaactacattggcaaaggtgagcagggtcatcaccgtaagacagatcacagccagtacttcctcgatcttatccaatactttcattcctcatccctccttctgttcatgctgaatatggaaagcgtcacaggccttctggccgtacttttctataaattcctgtttcatatcccaaatggcatcctggaaatccgccagctcctgttcactgagttcagtgaccgtgatgccctgttccttaaactgctcaacgatctgtttctcttcttcctccagggtatcccttccccattcacaggcttcctttgccttttcggtgagcagctcctgggtttggagctccagagactcccagatctctgtgttggccacaaacagatcactttcataggtataattccataaagtcatataatcctgaatttcatccatttttgcagactcggtaatgcacactccattctcttgtccgtcaatggttccctgctggatggcggtaaagacctcgctccagctcatggccacagggtccgccccgagggtgcggaagaatttcatgtacacttcactgcccgggacacggatcttcagacgcttcacatcctctggggtgcggacttcccgcttgctgttggtgatctgccggaatccattgtgaaaggaccccagataggtcattccttttgccgccaggcgttctgcgtaatattctcccccggttccgtctatggtctgtctggcatcctcatagtcttcaaagatccatggaatggtggctacggaaagctgttcatccaccactgccagaacacaggtggcataggctgccagatccacacctccccctgcgatcatctcaattcccttggatgagttgcccccggccagctggtcgttgggatagacggctatggtcacgtttccccctgaggcctcctccaccagctgggcaaatttatctgcaaccctggcgtcaatctggatatccgttccatttaccgccatgaccagctcgattttctggtagctgttcccgtctgcatctgagaccacctccatctgggaaggtcccccgcatcctgtaagcatgctcaccgtcaatatccccccggccagtaagctcaacacctttgccttcataaatacctccttgtatctgtttttctctttctttttcgctacatcctacgttgccccttgttttaattacatcctaacatcctaccttagaaaagtcaactggttttagcattttccacgatactcacaattttcacctggcttttttgtctataatatccaaaagcggaccttcccgccaatctccctccagggatcttatcatacctcttgtaaaactcctcctgtttcactataatagtatcattgtgaaaaaaagaaagaaggttgtgtatttatggaacagcgggaacagcggctgggcacagaatctatcccaaagcttatggtggcactggcgatcccctctgtggccgcccagctgatcaatgttttgtacaacatcgtggaccggatgtacatcggccatattaaagacgtggggcacattgctctcaccggagtggggctcacctttcccattattatgctcatctctgcctttactgcttttatcggagcaggaggtgcacctcttgcctccattgcactgggaaaaggtgagcgggaccgggcagaacggatcctgggaaacggcgttacggtgctgctattcttttccctggtgctcacagttttctttaccatctttaagcggcccctgctgtatttattcggggccagtgacaacaccatcggatatgccgacagctatatcaccatctacctgctgggcaccatctttgttcagctggctcttggattaaacatgtttatttcctcccagggacaggccaagacagctatgctctccgtactcatcggcgcggtcaccaatattgtcctggatcctgtgtttattttcctgtttcacatgggcgtaaagggggcggccctggccaccattctctctcaggctgtgagcgccgcttgggtggtccgctttctcctttcttccaaatccgccatccggatcaagaagaaaaatctgcgtccctccttttctctcattgccagcgtgatggccctggggatctctccttttatcatgcaggccacagagagcgccattaacattgtgctgaaccggggactgcagacctatggcggggatttatatgtaggctccatgaccatccttcaaagtgtgatgcagcttctggtgattccggttcagggcttcacccagggaatccagcccatcatcagctataatttcggtgcccggaagtttgaccgggtgaaaaaaacttaccggatctccatcgccctgacttttactgtggcaactgccgcctgtctgactgttgtcaccttcccgggggtttttgccggaatcttcacctccaataaggagcttctggctttggtatgcaaagtcatgcctattttcctttccggtatttggatgtttgggatccagatgggctgtcagactgtatttatgggattggggcaggcgaagatctccctgtttctggccttgcttcgaaaggtgttccttttgatcccgctggcccttcttttgcctaagtttttcggggtcatgggaatttactacgcagagcccatctctgatattaccgcagccgccactgccggactgatctttctgtttaccaggaaaaagatcttatccgaagaggcactggcaaaaattcagtaattgaaaaaagcggcctggtgattcatataaaccgcctgcatatattaataatttcttacatttttgaaaggtttgaagaaaaattgtaagctgattcgatggatataatagagaataagaattacaataatagcacaaggtaagaaatatatttaagaaaggcggatggagatgaaaaagattgttcgtacagtaggtatggtgattcttttccttttgttcctggctttaagcggagcgggaattttaactgtaaaggggtatctggattataaaagtgccgtaaattttgccagccttgatgtaaaaatgaatgagatccgccagaaagaaaatttcactccctatgaggagcttccggacctttataaggcggcggttctctctgtggaggacaaacgattcttcaggcataacggatttgacattttggctacgggcagagctctttaccatgatcttcaggcgggaagcctggtggaagggggcagcaccattacccagcagctggcaaaaaatatgtattatacccaggagaagaaattcacacgaaaaatttccgaggtttttacagcctttgctttagaaaaaaggtttaccaaggaagaaatttttgaagcatatgtaaacagtatttatttcggcgagggctattacagtgtggcggatgccagctacggctattttggaaaagctcccagtgagatgaccccttctgaatgtaccctgctggcaggagtgccaaacgcaccgtcagcctactcccccgccgtgaacctgaagctgtccaagcaaagacagaagcaggttttaaagcagatggtaaactgcgaattcctcactcccgcagaagcagaccatattttaacaggagatacccttctggccgacaaaaaaggagaggccttccaaagcctttcctccttccgcacccagaaagggctggcggcacaattggcggaaagtgtgtggaatatgggaaaacgggcaggaaaatatgcaggggatacctttttattcaaaaatgaaatgcagaacatacataacatctataattttgtacaaattttagatgagattatttaactcctctccacctgagggaagtgcagacggatctcaaagccctggccccactgggaatgaacctccaggaaaatgttcagatcgtctgccacttccttggccaggtacaggcccatgccagtggcttttttccgggtgatccccgtatctcctgtaaagcccttctcaaaaagaaagggcagatcacaggtacgcacccctaaaccattgtctttgatacagagaatacgacaattctccccatcttctacattaaaagaaagatgcggagtttcccaattcttacagtatttaatggcattgctcacaatctggctcaatacaaaaaccaggcctctatggtcagaaaagattgtgacacaggggatctcactggtgatgataaagcccttttcctccaatagaggctggtaatcctccagcacctccctgcagcattcctccaggagcagaggttcaaaaagatagtccttctcaggccctttcacacgggcataatacagcatctgtcccacaaattcctgcatctggtttctcacataattcagcttataaaacaccccggagggcagactttctcttcggttatccagtacaaaagtaaggagagagatgggtgttttcacctcatgggcccaggcctgtacatagtcctcataatcatcgatccgggcagttaactgtgcctggatctctttattttcccttaaaagctccccgatctttccgatcagctccccctcctgggcgctgaccatgccaaggagccgcatctgctgtgcctccccagggtgatttagaaagtccaaaaaagcctgttccttcatctcctcttttctgcagatccacaggaggatcagcacaaaggaaaacaaagaacccagcacaatggtggccgtaagtacagaaaaagccttggaatctgccagccacagtaaaaatatagaaaatacgtccacacacagtaaaagcagaagccagatcaagtgcttccgcagatattttaagtaattcatgatgcagctctcccactatttttcatacgtctctcctgccataaccaggcggtagcccaccttgcgcactggacagatcctgcactggagacacagggccttcatggtctttttcaggcgggtaaggtttacctggagggcattttcatcaatgtaccggtccgtatcccacagggcattacagagcatttccttggtgagaatttcctctctgtgaaggagaaattcactcaaaagcctcccctgattttggggaagcacagtggattgtccccggaaatataacgtataggtctgcttatccagcaaaaagccagggccctccagaagattggagcggccctcataacgccggagcagattagcggctctggccagaagccgctcctttctgcagggcttggtcaggtattcatcagctcctaaatccagggcatgaagctcgtccttcatctggtcccgggaagtcaagaccaaaaccggaagggtacttttttgcttcagctcccggcagatttgaaatccgctcaccccgggcaggttcagatccaggagcacaagggcgggccttctgtccaggatcgcatctgtgacacaggaaaattcttggatacatgtgacttcataaccatcctttttaaaaatttcctccagctcttctctcataaagggctcatcctcgatgatgacaatttccttcacttccggcccctcctccctttgtattgtcctttgcctggtgcccggcagcaccttttacactgtctttattcctcccgcacgggttccatcatggacaggatctgtcggctgctggcccggctcactgctgtaagataacaccattctatcacacaaagaaagattatcatagccaatgcaaggagaaacaggcccagcgtctcactttctatgccagggggcagcattcccacaaataaggcttttacgccaaagagactgcccaccccggccacgaggacgggaataccaaaataccaccggatctgccttttagcggaggcacacagctcctggcagctgcttccaagacggataagggtgcggtagcgcttcccagttttttgctgctgcataagaaactgtactcccatgatggtgttggagatcaccaggaagatgactgccagatataaggtaagatagctggcggccaccacataaaacaactgcctgcccatattctgaagataactttcataggataggcccgtgccgttaagctgtgtgttcacctgggagatggcctccatgaggctgcagttttccaaaagctctggctttagtattccattccaatacctgtcatactggtctggaaccagctcctcaaactgttcgtctggaacgatcagggcaaaggacagggtgatggaacggtcaaccaccaggttggtggtctgcagcctgcctgtaaggcgccagctctgtcctgccagatgtacctccggctccttggccagtatccggtccagaatgttctttctctgtacactggaaaattctgtgtccatatagactgccgcctgacctggctgcagctgtacacgctcctctcctgccgcttccaaaagggtattgtagccggacagtgcgattaaatagggagcatccacgtatcccagattattctccagaatcattttttcatcagagtgtggttcttggtccagtaaatccatcactgccttcatctcatagacattttccaagtccccggcatggagaactcccaccttcatctggaacagtttatcaaagttttgtgaaattccagtatcctttagaattttcatcacatccttgtttccatactctgtatcaaaggtataatccatcacatgttcctcccggccagtatagctccaggccgtggagaccccaaagccaaagcagcaaagagcggcaaggatcaaaagggagcttattgccatggaggtggactggcagatcacattctcctgaagctgacggaaggtaaatgtgtgaagccccctgttttttcctggtgcggccgcaagaaagcccaggactgcccgaaggccgaaaaataaaagaaacgttccagccagccccagaaccaccgttccagccatctgcttcaggccagcccaggacaatcctttgatagccattgtgtaggcagccccaaggaagagaaggcccagcaaaaaagcggcggctgatatccaggcaggcggctgcttcttcgtcccctccggctctggagccagaaggcttccaatctccgcccgggaaattttgctgctgagaaggacaaaggccagaaacttaataaagagaaagccaatcacagttccggccagggcctggacagaaagggtaaaccggtggcctaaaatgccgatgcccaccacgcgcacagtgagaaggctgatcacttcagacagcaggatggcagccggaagtcccagaagcagagccagaagactgctccacaaatcctctgccagcagcatgaaaaacagcttggaccggcgcattcccatgatgagatacacgccgaactcatggcttctgcgctgaagctgatatttgctggcaaaataaaccaaaaagaaaaggataaacaaagtgactccgtaaaaaagcgggatcaacccaagcagcttgtccacagcctggctctccatctgttttaaaaagagaatcacgtcctgatgggacaaggacaaaataatataaaaggccacgatagagatcagcaatgaggcaaaaaacagaccattttccttccggctgcgccggctgttcctgcgtatgagatcaaagaacattggcactacctcctcccagctgagccatgaccagcaaaatccgttcataaaattcctgctgtgtctcctcgggcagcctgcggcgaagctgatggaaaatcactccgtcctggataaataaaatcctggaacaatagctggcagcattggagtcgtgggtgaccatcaaaatagtggtatccctctcccggttcagccctgacagcttttccatcaaggccttagcgtttttggagtccaaagcgccggtgggttcatctgccaggacaatctgaggatttaagatcaaggcccgggcggcagccacccgctgcttctgtcctccggacatctgggaaggaaatttgtccagcacctcctggatctccagatagtgggtaagatcctgcaggcggcggccgctttccttctccgtcactccatggatggacaggggaagaaggatattctccctgccagtgagattatccaaaagctcaaaattctgaaacagatatccgatcttgctaccccggtactctgccagctccttacccttcaaagtgctgagcttcacgccgttcatagtgatctgtccctgggttggccgcacgacagtggcaatacagttgagcagcgtagatttgcctgagccgctgctccccatgatccccagaaattcaccggccgatgcctggaaggtgataccgtccagggccttggtctgattctccctttttccataatatttccgcagagagtcaatctccaaaattttcttatccattgcaaatacctcctgtggtttctatcatcattgtaacagaagatatctttaaaaaacacttacagttcatgtaaggtaaggtactgtttttccttctcagccaaattcatacacacataatattccctcaaatcttaatactaatcccagaaacaaaatttcaaaataagaaaggaacctgccatgatgaacaagaaaaaccgccggaatctccctgctgtggccgcagcttttttgctgggcacttttatgctgctgaatctcactgcctgcggggatacggacaagaacgccaaagaccagggacagtcagagtcccagacaaaccaagcggactcttttacacaggaggagacccaatcagaccaggtaactcctgaggcagcggatgccttaggtgcgtatcttcaggaacaggacattcttatggcccagatgatgaaggatatggatgtggcacccacgggaaatgcctctctggattttctaaagggtatgatccctcaccatgaatctgccgttgacatggcaaacagctatttgaacaacggtggaaatcactccaagctcacagagctggcaaaaaccatcattaaaactcagacagaagagatcgaccagatgaatgccctgatccaggacatccaggcctccaatgagaccgatgaagaaaaggaaaaaggctatcttgacgcctatcagaaaatgatgggcggccatgcccatatgaaccacggcgcatcagatgcagtaaatattgaccaggcctttgcggaaggaatgctcatgcaccatcaaatggcagtggacatgtccaaagccattctggactatacggaccacgaagaggtgcgcaatttagcccagaccattatagatgcccaggaacaagagatccagcttatgcaggatgttatcgattccgcaaaatagaactgttggattcacaatacaaagatgctccctactggatatgcaagtgccaaaaaacactttgtacaccaatgggagcatctgctttatatatgaaaatcaattttctgggctgctaaccataaaatattgttgcctgtatgtaagagaatccacaacggatacttgacaattcagccaggacagctttttatagatactatcctgtattcgcttcataatcatttttttacttctgctcttaggaccatttgagtcaaaatcgccttcaagaaataggattactaatatttttttcttatcccttggcacctttgaatctgtcaaacctttccaaaaatcaacaagctcaaatgcactttctgttctttcagatttagaccaagaaccataaagacacacaattgtggatactacttttttcaccacttcaatgtcaagactattacgactttccatatcaagatttggaggtgccgcatttcgttttgtgttgttgatactcgttctccatatattctcattttcataacctgtacaatttttaatttcaatcagctgaattgtttcgtttgaatccgctagtatatcaattccttttgaatcaggaaatttattaaatttgtttcggtagaaaacggtatcatcaaacttcaccacatgagtattttcacaaaatgtaaatttaagacggctttcttcaatactccgttcatttccccccatacaacatctcctgttctctgtcatacagcagatcaaattcttccattacagcattatgtgataaatcagataaatattctgctgtttcgcattcaatagtttccccttctttatataatgacataaaattatacttcagtgcttttttaccattatttaatgaattatcataagaggctgccatattaaaacattgctggacgaaatagtcatgtgtagttataaatacttgtactcccatccgcgataactctataattgcatcaacgattggtttgatcatcttgggattcatgttggtttccggctcatcccaaaataaaaccgcattttttgacaagcttcctgagagtatcagatacataattgtagatagtttccgatatccttcagataccagccccatttcaaattcaccggcaccttttacctttaagtaaaaattcttatctttctgtataatacttccatttacaatctgctcaaaactcttcatcacgcgattttgttctgctgtattcggccccttacgcaaaggtctttccaaaagtctgatcaggtcataataagtttcttcaaaagcaatatgataatctgcatataaggagccgaaattttcagctgcggaaataatttctttaggcggtatataaaccgggctgttttccccaatatttaacaattgtccgctttcaatctcaatgtgtttttcctgccgatatccaaaccctatttttaattcacactcatgctcaaaagccaaaagaacatctgcacgattccctccctgtctgcggttcactaatcggccgatggcattcttatctggccggaaaactccctgcagcttgcttaccagcatagcttctattttatcttttgtcagatcaccctttgaggcaaaagcttctgtatatccttttaggacagaatacaacaattttatgactgcagtctttcctgtattgttttcaccactgattatattaatattgggcgagagctgcacgtccaaatgattaaaaatcataaaattttccagctttaatctatctattttcattgggttttccctgatacctttccgaattttctattcctgataataacattataccacatatgctccacgttaatcttaacgattctgatctcagtcatttttattaatattatagacggcagacaactatttgtacataataattttcttttataattcttacaaagcgggcaagcccatttcaactccccctcccctcactcatgaggggcttggcagctttgtgcgccaatgtgcagctgcaaagcagctttcctttgcacattgtgtacatcccccggagggtttttattacataggaaagttcagggaactttcctatgtaataaaaaaacagcgcccatgctttctatcttctataataaaatgatagaaagcatggcgctgcttttgttttctcttctcttaaagtcccttcccaccccttaagccatctggctgctgagggaggacttccttgataaggttaaattccagccagtttaaggatatccggtaccttggactcccagcccattgccatgatatgtacgccctggcaatatggcttacactctttgataatacgtgcggcaatctctacaccagtgatgcctgcttttgtcttttctttatcagctttcagctcatcaaacatttcctcaggaatatgaatgcctgcaacatttgcattcatatatctgcacattcctacagatttgggaattacgattccaagctgaaccggttttccgaactgttttgctttttccataaattcgataaatttctctggctcataaactgcctgagtctggaaataatcacagcctgcggcaacctttctctccattttcgcaagctgggcatcaatggaatcactgcagggtgatacaacggctcccttggcaaacttcggcggctctcccaccaactcatttccaccaagatccacgccagcttccatctgtgtcactgcatggatcagggatacagaatccaggtcaaaaacaggctttgcctgtggatgatcgcccagcttcgtatggtctcctgtcaaaagcaggaggttctcaatcccaaacagcgctgcgcttaaaagatctgactccagtgcgatacggtttctgtcacgacaggtcatctgaaaaataggtgtcagtccttcatccttcagggctttacaggttgccagagaaccaagacgcataacagaggactgattatctgttacgttcacggctgtgatgccgctgagataagtctttgcttcttccagcatatgttcaatatgaaatccttttggcggacctacttccgcagtaactacaaattcaccacgttcgaatgcttccgtaattttcattatacactgctcctaatcattctaaatttttaatcttgtttcgtcacttctagatctgttgcgaaatttctcacctgtgtggggcattttaacacatccagacgtcccagcatttcaagccgtctgtagatgcgctcccagccacattccatttcgctgtccacttcacatttgccgtttttagagccgccgcactgtccgttcaccagactcttggaacaggcagtgatagggcagatccctccggttaagttcaggtaacattccccgcactggtcacaatcgtattccagcggcgtcactccctggaagccgggcagaggataggtgtcacaggctgcgcacacctttttgtcctccagatattcagcaactgtctgcactccaacaccacaggaaaatacaagtaccacatcggcagcttcaatttcactcatgtgcttttggaggcgtaatttcatattttccggattacagatataatctgttgtgatgattccggtcacattcccgtctgcagctaattccttctgaagctctgctgcttccttttccgggaaatgaatttccttgcacccctggcagttaatgataaaaatcttctttccatccaccagtgatacgatagtttcctttggttttaattgggtaattaacatatcacttcatctccattatcgctttttttccagctttaatcttgctaactaatggaatcttggaggaacagatgtattcacagcacctgcactcgatacaatccctgacatttttatccagcatgccctgccagttctgctcatccgcatattttgcaaaatacagcggagaaagttccattggacatacatccacacagcgtccgcatttgatacattccactgtctgtgtatggtcggtatcaatggcaatgattccattggagcccttgataataggtacatcaacatccggaagagcaaatcccatcataggtccgcccatcttgatggtgacatcatcccctgtcacaccgccgcagtaatcaatcagctcttttacgctggtaccgatctttacaatataattgcccggcttcttaatattttcaccagtgacggtcactacacgttccgttaaaggcatacctgtctgaatggcatcggaaatagcctttacggtactgatgttgctcaccacaacacctacatctgctggcaggccgccccttggcacctgtctgcccatcacacgcttgatcagcatcttctcagcgccctgtgggtatttggtcttagccactaccacatcgatgtcgctgcactgggctgtctttgcttccagcagttcaatggcatccggcttattgtcttcaatgacgataagtcctttttctgcgcccacggtcttgatgatagccttgaggccatagatcacgtcatcggcaaattccagaagcaccctgtggtctgcagttaaaagaggttcacattcacagccgtttaacaaaatggtgtctaccggcttggctggttttaattttacagaggtggggaatccggcgccgcccatacccacaattccactttcacggacaatctccacaatctcgtcaggtgtcaggctgtccagatccttatggggttttacagattcgtgcagagtattttttccatccgactgaattaccacggacagaacttcgccgccctttgtggggtgcagacggggttcaatggcgatcacagttccactgacgctggaatggatgggactgcttatgaaggctgccgcctcgccgattttctgaccgaccttaacggtatcatttacctgcacaacaggagttgccggcgcacctgcgtgctgtgacaatggaataaccactgtctggggatccggaaatctttccagggcaatgtgctcggtaaactctttgcgctctgaaggatgaacgccgccataatagccgtcgagcctgttttcccgaatagatttcacataatcattgacaaacttgaaattaacctttgaataatctcttacctggacgggctgattcaaaaactctgagacgcgtccctgtttttccagtctttgatagatcttttcccaggcgcagtctttgttgctgtctacttcacatttcccgttcttagcaccgccgcattgtccgttcaccagactcttggagcagtccacaatgggacagatgccgccggttacattcaagtagcactgtgcacatgcgtcacagctcttcttagtcagcgccataccatggtgcccggtataattcagggaattgctggctgcgataacaggtctgcctgtcagatctgccactgtctggattcccagaccacaggagatcaccacaacattttccgtaccctccggaatcatgtcctgaagttttttctctgttagggtcttgttgcacaggaaatccactttcacactgcctgtaactgtttttccctgtccggcagcgatctcctcaaactcaccgcaatcgggttcgtcaatggtttcaaattccttgaagcacttgttacaagcaacgataaacagattatctttaccggttaataatgaaaccagttcatcgctgcttttcaacttatacttggtatagttttccaattgctcaccttccttattaattgattcacaaaccttatatttatctgtttttcttatcttctcatcctctgcacttgaagaaaaaatagaaaaaaacaaatagcttggttatgtatgtaatgcctatttaaatatagcacatactagttatattttctagcccaaacgcatatttttgtagaaaaaacatacattatatacaaaagaaacgccagcgcccactgtcatcaagaactgatgacagaaggcctggcgtaagattgaaaggtcagcgcaagtgctctttgtgtacttattttgtcttcttataatttctcagtaaaaaatttcaccaaagagctttccagcagctctgtcacttctggattctcctcgtagaaggcgtatccatggtctgcacctgtgatctcaacggtctgagcctccagcttttccgcgatgcccttgctgatctctggctctaccatcacatcctcggttccatagatcactatggtatcacacactggcttcaggctgtccattacgtccatggtatccagaagctgctgatagtgatcctggctcaccttcagggttcttccgaaccactcggtctccacataaccttcccctgcctgtgccttctccaggttctcctgctgctgtttctcaaattccgtaccgcttccgtttcctgcaggtgccagaagagccatggctttgtaaggattctcctctccctggttcatacacagagacaggcgtcctcccatactgtagccgaaaattcccagcctttcctggtcaatggggtaattctccatcacatagtccttgcaggcaagagagtccgcctcattgttcaccagaccgaaatccagaaagtcagccttggaatctccgcagccggcaaaatccaggcggacagtggcaattccgttttccgccagggtctgggcaatgctggtaaagccgccgccctcattgcgctcaccggcaaacccatgattcataacaaccagtggaaacggaccgtctccctctgggagcacaaccgtggccggaacctgccttccatcactttccacctggatgtcctccgatacgatccccgcagctgtctcctcctgggacgcccacactggctgtacccccactgcgcctgctgccggaaccgccattgacagtgcacacaaccaaactaacagtcttcttttcatttttaccttctccttgtcttgttgtattatttgttgtatgtttttaagatagttgtattatatatttctttcacttctctgtcaatgaaaaaaggcttaacaaacgcctcttcaagacgatttgttaaaccttgccaaatctgaactctgttaattatagaaatttactataaaatccatcttctcccctggaagataaaacttattattcattaatatctcaccattggaatcatagatatcctcaaacaccacaaagatcaactgcgtatcccacttgatggtatcctttctggtccagtccttctctctgagacacttgatctcaagagtcactctgtgggccagcctgtaaatatcctcctccacaagctttgtgatctcctcctggcttttaatatctgcagggattttggaaaatacgtcaatactcatgatggaggcacaaaagctgatgacttccccctgttcattataataataccggtctgcccccaatatcacgggactttcctttttcatgacaaaattaaaatagcttctgaaccgctctgaggtttccagctcataggacaccgaaacccgggcgattttctcattgcagcatttataaatgggattttctattttttccaggcccaaatgctttgaagtaaaggactgccttacaaaattccccacgccgtgacggttctcaatgatcccgtcctctgacaatattttcaaagcctggcgcaaagtcacccggcttaccttcagcagggccgccagctccggctcgctgggcagcctgcccccttccgggtaggtgccgttttgaattttctctaagatctgattgtagacgatcacatatttcggcggttttctttttgttctgttattctcttccatgtctgctcctgttgtatctccacggcgaatccttccgtcctatggatttctttcacagcaatagaataacacaatcctataaaaaattcaaaaaaatcattttttaggtcgttcctccagtgttaccttccatttaaggttcctgcagggcattccttcccatctgtgtctctgctgaaattaagcgttttctcccctgtgcttttaccaaattttccaactcctttatggcatcctttccgatccatacctgcgtcttattgccgttttcttttagctgatatgccaacagcagcgctttttcgttataatcgaaatccctttttccaatctctcttaaagcccaggacactgcttttttcacatggtcatgctccatataggaatactcctcaataagcttcaaataggaatccagcgtttcatctgatatctttttatcatggatcacagatgcagccatcagggtgaaagcggccctttttttatagatttctccagaggtgatccattcatcaataaacactccatagtcttttcttttcatgatcaggttcttacataaatggtcgcacagatcccaggacttcacaccagatatcagccgctgaatatcatcgttggtgacctctttatagggaaataagagaaccgccagaagctttgcttcgtgaaaaccagtatcccacagctcaaaggctgtttccttggactttcctattttctttgccagacttcttatgactgcagttgagactccaatgctgcattcttccgggattcccattttcaccacattggccttatatttgtcagaagcctgtaatcttagttcctgtaaaatttcttctttgtccatacccatttgtttatacccagctcctattcctattgagacaacgctctttgtaaatcttctatatacagcgcctgctgttttttcagatatccctttacaaagggcttcatccatagcttttttgccgtcacatcctcggtaaaatccacttccgtgccattgccattttgagtgaagattccggtccaatgccctttcatattgctgttttccatgtcaaactcgtaacgcctgcagggctcttttgccgtgatggtaaaggtggtggcatacccttgttttgtgtactctagaaactgattttcatttatgatctcaattttgctcagatcacatcgccaggtatcgttatcaagggagactaccgcctcccataccttttgaatattgtgctgaaatgttgctcttatggtagaaaccgccatgtgctgactcctttcctagctctcaaattttacttgggatgggtctgggatagaattaccgggagccagtattcatacacacagtcctttgggtctgccttcaaataaacctcaatatccggaagatctccatagtcataaccagaggatggcagccattccgtgatgacccgccgttccaattcctgcagggttttatttgtcccttttccggaaaatacagcccaggaggcaggagggaactcataagcttccattccttcttcctccttggaggcgcttactgcaatgaaatatctccaatcctccctggaatgcacactgacccccagcaagccagatggttcgccctccatcaatgtaagaagcttgtccagggtgccgtctgcaagggccttgtcccacctggctgggatcctttcaaagttcgtctccaattctctggcaagaggaacgctcacacccaaaatacgaaatttcccctttttttctatgcggaaattcagcttgtcagctccttttacagaaaaggaaaactgaagggcagggtaagagaccgcgggggcacagccctttttcaccatggacggggagactccgtgtacgctttggaacgcacggttgaaggccgtgggggaattgtaaccgtattttaaagccacatccacgattttttgtccctcctcctgcagctcctcagcggcaagggacatgcgccgcctccggatatattctgtaagcggtatatctgccatacaggcaaatattttttggaaatgataggcaggtaatcccacatagtccgctaattttccgtaatcaatgggttctgtgatatgttgctcaatatagctgattgtctgattcaggcactctgttaaattcatgaccatccatccttattcacctttattataaacttcacaggtcaaaaatacctctctgttttactactaaaacagagagatattttatggctagaaatattcaattcttctttaaaaatgaatttcatggaattcattccaaaaacccgcaaaagcccggtaacactgcgcctttgcgggtactctttctctattaatttatactcatccaatatacatcgcatccccaaagctgaagaaccgataccgctccttcacagcctcttcataggccttcatgatcttatccttcccggccagggcggacaccagcataagcagggtggattcaggcagatgaaagttggtgatcagcccatcgatcatcttaaacttatatcccggataaataaagatctccgtccatccgctgcctgccttcaaggtcccatcctcccctgcggcggattccagagtacggcagcttgtggtacccacggaaatgatcctgcccccggctttcttcgtggaattgatcagctccgcctggtcctcttctaccacgtagaactcggaatgcatatgatgcttctccacatcatccactttcaccgggcggaaggtgccaagacccacatgaagggttacatgggcaatttttacccctttttcctgcacctgctccagcagctctttggtaaaatgcagtcctgccgtgggcgctgccgcagagccctcatttttggcatacacggtctgatatctgtttttatcctttaatttatgggtaatatagggaggcagcggcatttctcccagcttatccaggatttcttcaaaaatcccctcataggtaaactgaatcaggcggtttccttcatccaccacatccagcacttcgccttttaagataccgtcaccaaatacaatccttgctcctggttttgccttctttccgggcttcaccagagtttcccagatattgttttcttttcttttcagcagaaggatctcgatcactgcccctgtgtcctccttgtgtccatacagcctggcagggatcaccttggtgtcattgatcaccagacagtctccttcttttaaataatccaccacatgcttaaaggtggtatgttctatattcccggtcactgggtccagatggaggagtctggatgcacttctgtcctccaggggatcctgggcgatcaattcctggggcagatcataataaaaatctgatgttttcataagctctcgcctttctcctagttccattcattcacaaaaagcatcataacacaaaaatacaggaaatgccatatgcatttcctgtacttcctttatactccgtatacctggtcctgggccagaagcctggcctggccgtctttcacttccacaatgttcacacagcagtttggtggaacacttccatgccagaaatctccgtccggctcatacacattctgcagcagagctctcagggcacagccgtgggtggtgatcaggatggtgctgtcctgaagctggggattttcggtgagctccctccagaattctctggtcctgtcacacacatctacgatgttctccccgtccctgggcgcaacaaaacgccagggatcatggaaaaagcagtcaaaatccgcggaaaaggccccttcaatggagcagccctccataattccaaagttgatctcctggatacgggcatcctggatcaagggcacgtctctgtccccaagcacatattttgcagtgtccaaagctcttttgagagggcttgacacagccaggtcaaattccacatccttcagggcctccccggccatctttgccaaggtaactcccttttcattcagttcaatatccgtggagccctgaatccttcgcagggcgttccacttggtttctccgtgtcgcataatataaagcagcatattaactcctcagttcgattccaaggccagtcaggccattgagaattttcttcatggcagcagtgatctctgcctcctccagggtcttatcatgtgcccggaacacaacggaataagccatggatttgtagccctctttgatctgagagccttcgtaaatatcaaagagctgatagctttccagaatcttgccgcctctttgcagaagcacctgctcgatctgtcctgccagtacagtttttggcaccaccagactcaggtctcttgtcactgccggatattttgcaatacctgtgtatttgtggttaaagcttgcaaattccagtacggtggggatatcaaggactgccacataggccttttccccaatatcataggcatctgccaccactgggtgcacctctcctaaaaagcccaccacggtttcctgatagataagattggcctggcgtcctgggtgcaggaagggtttctgggcattgggatcataggtgatgcgctccttcattcccaccttctccaggaactcctcgcagacacccttcatgtcaaagaagtctccgctgccgcacatgcccagggtaaatttcatgcgctcgtcaggcagctctgtaagaggcagtgccttgggcagatacacatttccaagctcatagagacgtacctgtttgtttcttctgttatagttggtggccagggaggtgagcattccatttaatgtgctggtgcgcatgatactgaagtcctctcccagcggattgctgatggtgatagcctgacgaagggggtcctcttttggcagacacagcttgtcaaataccttaggactttcgaaggaataggtcatgccctctgaaaaaccgcagtactctgcaatgtctctggcaatggattccacacgaagcttaaagggcagctttcccgtagtggcctccccgcagggaagcgttgtgggaatcttgtcataaccatagaaacgggcaacctcttctgccacatctgccatgcagtggatatcctggcggaaggtgggagcgacgatctcattggaggcctcatcataggtaagctccactcttgcaaggtattccagcatctcttccttactgagctctgttcccagaagattattgatccgctctggttcaaagggaactctggagggctgccttgtctcgctgcacacatccacaatgccgcctaccacttcccctgcgcccagctcttccataagctggcaggcacggttgatggcagcctctgcattgttgggatccagacccttttcaaattttccggaggcatcggtacgaagaccgattttcttggaggacagacggatgttggtcccgttgaaggtggctgcctcaaagagtaccgtctgtacgctgtctgtgatcatagaattctcgccgcccatgatgccggcaatacctaccggctttttgccatcgcagatcatgagtacagaatcatccatggtacgctcctggccgtctaaggtgacgaatttctcacctttttttgcccggcggaccacaatctctctgccctcgatggcatccaggtcataggcgtgcataggctgtccgtactcttccatcacataattggtgatgtccaccaggttgttgatggggcggatcccattggctgtaagacagcgctgcatccattttggggagggaccgatctttacattttttaccactctggcgcaataccggggacataagtccttgtcttctactgtcacctgaatgtaatcagaggttttctcctggttttcctttaccttcacaaccggaggacagaacttcttctggaaggtagcggcagcttctctggcaatgcccagaacgctgtagcagtccacacggttggaggtgatctcatattcaaatactacgtcgtttaatcctagggcttcaatggcgcttgctcccacctgggcatcctgtggaaaaatataaattccatactcaggagcttccggatacatttcctttgtgctgcccagctcttcaatggagcacatcatacccaaggactccacgcctctgagttttccctttttgatctgcacaccgccgggagttttcttgccgtcgtggctgcctgccacttggcccccgtccagaaccacgggaaccttgtctccctctttcacattcggtgctccggttacgatctgaaccgtctgctctcccacatttacctggcatacgatcagcttgtctgcatctgggtgtttttcaattttttcaatctggccgataacaatattttccagatctgcatctaatttttcgaagccttctacctttgttccggataaggtcatggcatccgtatattcctgtgcggtcacatcaaggtccggcacatacattttaatccaagatagtgaagtattcattgtcttcttaaccctttctttcattctctgggctctttgtccacggttatgccggccgcctctttttttaagaacggctggagcctgtggatggccctgtcttgattttgatcagcctgtgtatcctgctccttttccttagaactgtttcaggaagcggatatcattttcataaagcagtctcatatcatcaatttcatacttcagaagggcgatccgctccaggcccactccgaaggcaaaaccggagtattcattgggatcaatgccgcacatttccaaaacatggggatgcaccataccacagcccagaatttcaatccagccggagcccttgcagaaccggcagcccttgccgccgcacttaaagcaggatacgtccacctctgcactgggctctgtaaatgggaaatgatgaggacggaattttgtcttggtctctggtccgaacaactccttggcaaattcctccagagttcccttcagatccgcaaaggtaatgtgcttgtcaatgacaagtccctcaatctgatggaaggagggagaatgggtggcgtccacctcgtcagaacgaaatactctgcccggtgcgatcatacggatgggaagcttaccttcttccatggtacgggcctgcaccggtgatgtctgggagcgcagcaaaatggagtcgttgatgaagaaggtatcctgctcgtctctggcaggatggtcttccggaatgttcagcttggtgaagttgtagtctgcatactccacctccgggccttccaccacttcataccccattcccacgaagatacgctctacttcctccagagctatggtgttggggtggcggtgtccgatcctggctttcttggcaggcagggttacgtcaatgacctcttcacgaagtctggcgtctctggctgcagattctaatttttcacgggtctcctccaggatctgttcaattttttccctggtctcatttaccagctggccaaccttagggcgctcctggggagcgacgtccttcattccctttaacagggctgtcaactccccttttttacccaggtatgccactctggcctcattgagcttgtccaggccttccgattccatgatccgcttcctggcttcttcatggatctcctgcagtctttgtttcatatccatgttatcagttctccttttgtttaatattttctctgaatcaacattcccataacaaagcaggtaatcccgcttcaacttcccatcccctcactcatgaggggcttggcagctttgtgcgccaatgtgcagctgcgaagcagctttccctggcacattgtgtgcatcccgcccggagggctttttatgttataggcaagttcggagaactttcctataacataaaaaaagctccgccccagctagggacgaagcagcatcgcggtaccaccctgattcccatggatcatccatgggcactcgtatctgcttaacgcgcagtcacgtcacctcctactgctcttcagaagtgcggctccggtgggaatctcaaaaactgtctgaacttaaggaagctttcagccggtgacttcctctctctgctagaaaacagctttctactgacaccttcaatgcctttatcaactatctttgtatattttaacacaatcctttcatctgtcaagacttaaaatttcctgaaaattccttgccgcaaattccagaactgcccctagtagcagccctgttgtacatcaactatttgttctcgtccttgtccttttcgaaaaagcctcgggcaatctcctgagcctggcggaaatccttctcataataggcattgatctcagccccgtacagcacaatgttcatgcagatatacatccacagcataaccatgatcaaggtggccaggttcccatacatgttgctgaagttagggaagaagtcaaaatatatggaaaagaagtaggaaaacgccgaccaggccacagatgtgagaaccgcacctggaaactggcttttaaaggtggcttttctgttgggaagcattttatacaaaaacaaaaatacaaccatcaaggtcaaaaacacaagaaaagtcctggctccgatgatccgggccacaatctcccccaaaaagggaatgtacttggccagcaccttctggatgctgttgccgaataccaggaggatcaaactggcgatgagtgccaccacaaagagcagcgtataaaacactgaataaatcctggtcataagccagttacgggtctcacgcacatggtagatggaattcagaccattggtgatggcctgcaggcccttccccgcagaccacaaggccgtgatggctgtgatgggcacaatggcatcacttctcccgtagacctctgtcataatgctgagaacatagggctgaaggccattgggaatgatactggcaatggcctccttcatcgtattatacgtaagcggtgtatacctgatcaaggttgtgagaaacaaaacaaatggaataaaggataaaatcaggaaataggcagcctgtgctgcaaaggcgctcacatggtcacgctgtatacgccgcaaaaatccccggatggatgtctcttgctgactttttatgttcataggcgaatccctttctgtacatgtccttatcataccatgaaatcgcccttgtgacaagttatcagctctttgtgtcagtctagaatgctgctcacatccatcagctccacctgattgaaaaagtaatccaggatctcctgataaccggtaccctcctgggccatatggttggccccgttctggctcattcccactccatggccgtagccgcccccgtacagggtatagcctgcaagcaggccgttttcatcataataaggctccatggaaaaataggcactgggcagtgtggtctgatactcgctgactgttccgtccttctgggtaatgggcagcccatagggagacaaaaaagaacggatggcatattccttgtggatggtctcttccccatccccggttatgatccgaagctgggtgactgccccggactggctgatcttgcccacagccagacgctgtacctgctggggtatgccaaaatactggtctgccaggctgttgatccgctcaatgggaaaggatacctgccatttgctccagggctcactggcatcgtagagacaggccacacttttcagataaggggcctcctgctcactctcccacacctcgtccgtgctggtggctcccgaggaggtggaaaaatagtaggcctcaatgggctccccgtcctggcacagaatttctccccttgtggcctccactgccctggatgtggcctcctgggcctgaatgttgttgtacacctggtaattcacactgtcatccacatctgccccatactctccaagggaattctgctctctctgcctgcaggcataggtacgggcacagactgcctgggctttcagggcctcctcctcatagtaggccggcatctcgctgggaaccaccccacacagatagtcctccagggaaagcttattgacaatcaagattcccgcttctctttttttcaagatcagagtgcccttgtagctggggtttccctgctgccgctcaatggacaggatcttaatctcatcctcctgggaacggggggtgatgaccacatctccattggaaaaggcctggctgtccatggtaaagctcagtggctgcccattcacctccagctccactgaaggatggtaataggactgaaaaccggtgttcatgagcagcacccgcatttcaagagcttccccgctgacctgggccgatgtttcctgtgtctcttctttggttgtcttctctcccacccagagctttgcttgtaccttctgtcctgcccctgatgacagcagaataacagcgcctgcaagtaaaattccttttttcataacaaaactggtcttcttcatattatcatcatatgagaagaccagttgtttcattcatggaactattatcaatttttactatttttctgaaacaccgaactgatatacggtttcactgctgtatgtgctgcgggcatctaaaatcggtgactcgaagctctcttcattgatggcatttggcgcatattgggtttccaggcagaagccgcctctcttttcatagattctgccatccttgcctttttcattgtccacaaaattacctgcatagaactgaacgcctggaagatctgaaaatacctccatgacaatccccgtatccagtgcatgggctttggcaatcttcctgagagttcccttggtatatcccctgggcaggaagttgtggtcatatcctccggtaaaaataagctgctggaaatccgcatcaatatcccggccaatctgcttttccgtacggaaatccatgggcgttccttccacggaagcgatctcccctgtgggtatggatgcgctgtccagcacaggagtatagctgtctgcataaatagccagatactgctccaggatcgttccgcttccggcccctgacaggttaaaataagaatggtttgtcaggttggcaactgtatcgctgtcgctgactccataataagagattttcagctcattgctgcttgtaaaggtatagcgcacgccaatattgaaggtacccgggaagccctgctctccgtccggactgatcctgccgaaggtgatgctgttctctccctcgttcacgtctctcacttcccaaagctttaactgataaccgtccggaccactgtgaagattattttcattctcattctgggtcatctggtaaaccttgccgttcaaagtgaatttcccctgggcaatgcggttgccgcttcttcctatggtagctccgaaatagcagccgtttgtctcataggactgaagctcgtcataccccagaactacgtccgtaagtgtgccgttcttgtccggtacacacacacttacaagtatggctccgaagtccatgacttctatgtatgccccatgcttgttccgaagacggtagagtgatacagtctctccagtcttcaacgtcccaaataccttcttctcaatactcatttttttagtatcccctctttcttatttttcctttattttcacagccacacccctcccggatgtaccaggaaatgatccgctgtgcatatccatgtagaaaaagagagctgaagcaatcagctctccttacattctttaaactcccgaaatgccgttcccttattttgacgcctagccgcagctaggtgggcgaccgcaacagatattctgtcttccacaacttgaggcctgacatcctatctgcaatataggaatcccgttaagtcgatgtaggttcaaaataaaaaggggcatcgcacatttcaggattgcttctttttctttgccttcattatactctagtatgtacgttttttcaacaaaaaatacacaaaagatttttcacgttacagaccagatccttgcccctgtccccatgaatcatcagcggtcctctctgaaataattcacaccgcagttggccgggatggtatttttctttctcttttgcatggagctgaccacaagtacaatggcggtgatcaaaaatggcagcatgtcataaaaagcattgggaactggcaggctcttgggaacgtaatatttcagtattcgaaaagcgccaaaaacaaaggaaccccaaatggcgatctgaggacgccagcctgcaaaaattacaagagccacagcgatccagcccaggcctcccacacagtccggaagccagacgcctccgtttgtgatcattaaagtatatgcgccgccgattccgcaaattcccccgccaataataatatttaaatatttcagacggtttactggaatgccggccgcatctgccgcactggggttttcaccgatgcttcggatattcagacccagctttgtgcgaaacaggataaatccgcagatcagagcaatgaccacacctacgtatacaaacgggttgtaggaaaacagaagctttccaaggacaggaatatcgctgagaccactgatgtgcacatttttgatctggccagaaatatgggccggcagcttcaaagagcctgtctgggattttcccaccataaaatagcccacaaagttggaaagaccaataccgaaggtggtcaaagcaagacctaccacattctggttcgccataaaggtaacggtgagaaccgcatagatcaaagctcccagagctccccccagaaatgcggccacaagagccagaaacagactgtccatctgataccccgccagaaatcccgtacaggctccaatggacatcattccctccacgcccaggttcagatggcccacacgctcgttgaggatctcacctaccgttccgaataagagaggagttccggcaagcacagccgccacgataaaatcgagaaacatattcatgcttttttccctccttttcttccaacgaatttatattgaatgaaaaattcacacccgatcacaaaaaacaagatgataccctggagcacgtccgaagatgcggaagaaagtcccagggaggattctgcgatggagctgcccttctccagcacagagaacagaatagtcaccaccaaaatcgccatgggattcagccgtgccagccaggccacaataatggccgtaaagccaacgccgccggccactcctgtagccagggtcagatccgagcctgtggcctgtgtcattccgccgataccgcagatggcaccgctcaaaaacatggtgcgcagaacaattttttttaccttcatccctgcataccgggcagtgctgtccgaaattccaaccacgctgatctcataaccttgtttggattttttcagatatatatacacaaggactgtaaggatcagtgcaatgatccagccgatatgtaccccccataccttatccagatgggcattgggaccaaaggtggcgatcttgggaaaaccgccggactgagggtccgcccaggggccgtctcttaaaaagatgatcaggttcagagcaatgtagttgagcatgagggtgaacaaggtctcattggtattgtatttgatcttgcacactgcagggagcagagcccacagaccgccgcccagcatacctgccataagcatgaccaccaccagcacccagtgaggccaggaggactggtaaagggcaaaataggaggcaaagatagctcccataataatctgcccctcggctccgatgttccagaaccgcattttaaaggccagggtcacacccagtgagctgatcaacaggggggttgcgatcttcatggtagcctggatggccattttgctgcggaaggcgccgtttatgatggtttgatacacctccaggggattaaaaccgatcagcagcaaaaacaaacctcctgcagcaatggccaaaaccacagaaaaaattctcagcaaaaacgccttattggaagaaagctctgattttttcacaacccggagcaagggctccttgttcttcttattcatcaacactcccctcctttctcacaccggtcatcatcagacccagctcttcttttgtcacagaggcggcatccacaatccccgtcacctctccatggcacaggaccagaatccggtccgccagctccagcaatacatccaggtcctctcccacaaagaggatcgccacctttttcttcttctgttcattgagcagatcatagatctgataagaagaatgaatgtccagaccacgcaccgggtaggccgtgatcagcacatccggctgggaggtgatctctctgcccagaaggaccttctgcacatttcctccagacaacatgcgcacaggggtctctgttcctggcgtaacgatctccagctgtttcacaagctccttggcctgctttctggcctcagtctggttcattaaaaatcctggctggaatcgatagcttttcaaaagcatattttccgtcatgcccatagcagacacaagacccatgcccagacggtcttcaggcacaaaacccatggagatcttctcatcctggatctgggtggctgttttccctgtgatctccttgtctttgtagtaaatatgcccctctttggcaggcataagtcccgccagagtttcacacagctccttctggccgcttccggccacacccaccacgcccaggatctctccgccatagagctggaaggatacattttttaaagccatggtatggtccggccgctccacagacagaccctgtacttggatcttcttttctttctcctggaccaaaggcctttcgatttccagatttactgcccggcccaccatatgctctgtgagctccttctggctggtgtcctttgtaaacaccgtatccatgcttctgccctttcgcaggattgtcacacggtcactgatactgagcacttcatgaagcttgtgggtaatgatgataatggctctcccctgttttttcatctctcttagaatggtaaacagcttgtctgtctcctgaggggtgagaaccgccgtgggctcatccaggatgaggatttttgcccctctgtagagaaccttcagaatctctacggtctgcttctcacttactgacatatcatagattttcttctctgggtccatatcaaggccgaaccgcctggacagctcctcgatctttgccttgagcacctttggtttttccagcttttcctttgtgccaaggacaatgttttccatggcggtgaacacatccaccagcttaaaatgctgatggatcattccgatccccagctcctgggcatccatgggggaattgatgatgacttcctttccccctatgtagatgctgccttcatcgggatgatagatccctgacagcatattcatcaaggttgtcttgcctgaaccattttcccctaaaagggccaggatctctccatactttaaattcaggtcaatatggtcgttggccagaactgtgccgaaacgcttcgttatccctttcagctctatcgcatagcctgtttcagacatccctttaaccacctctttctcctgtgttatttgtaaccgaaaggaggcggccgctttgggccgccttcgtctcttcggttgcttgttcttttattctgctactacattcttgtaataccagttgattcctcctgtgatatcagcatcagacagggttccgccttcttctcctacagtcttgccgtcgttggtctcgatcacgccgtcaaatacattaaaggagccgtctaaaatctttgcctttgcctcctcgatcttagctgccgcctcttcattgttaaagtcagccagatcagagagaaccaccagaccgtcatccatgccgccaaagtagttttctccagtccatgtgccgtcgatcatatccttcacagccttggtgtaataaacaccccagtcccacataacagagcacagagtcgcctctggcgcatctttgatcatgtcggaattgtagccaacaccccatacattctttttctctgctgcaagctgaggattgggggtgtcacagtgctgtgcgatcacatcgcagccgttggccagaagggcctctgctgcctgggtctctgcctcaggatcgtaccagctgttggtaaccttcacatatacctgcgcgtcttcgtttacagaagcaacgcccatggcaaaggcatcaatgccgccggtgcactcggagttctcaatgcccatggcagacacataacccaccttgttgctctcggtcttaaggcctgcagcgatgccgcttaagtatctggactgataaattcttccaaaataattcacaaagttctggccattgcttttgtatccggttccatgacagaacattacttccggatattctgccgccagcttctcacaggtatccatatacccccagcttgtggcaaaaataatattacagccctcttcgatacactctctcattgcattttctgtggcggtggggtcaccgtctgccacattgttcttgcggacgatctgattgtcttcaaggcccagctcctgttgcattttctggaagcccaggtcatgggcataggtgtagccagagcctgccgccggatccccaatgtggatcacgcccacctttacgtcttcctttgccactggatcatacagtccgtctgccgcagagacctctgcaggtgcaaagccggcaaacaaaccggctgccattaccagtgaggcaagtactgcaactaactttttcttcatatcattttcctcctttttctttaaaaaaagcgccaatggatattcaatatcttttgcgccttccccttccaaaatagtctgcaactttatggaatttataaatattctaccctctttttgtcctatcgtcaattacttttcccaaagccttccaaaaaaacttttttgtatgtatctaaatttctttgtatctgaaagtttcctgctctttcatccccctggccagaggaacgggacagctttgtgcatcccaccggaggatttttgctgcatgggaaagttcttggaacttttctatgcagcaaaaagggctgccgcacttggtgcaacagcccttataagccaaaataacttcaattatggaattatgccagctcgtcaacaaccttctgaactgctgcaagagcgtcatccggaagtttgtcgtaaccgccttttgcagttgcaaaagaggtgatctcgtcaacacggtcctgcatacgagctttcagctgtgctacatactcaggatcttccatgttgggaacaaagccttcccaatccaggatctcgatgtcagagaatggaccccatttgtggaattctgctctcttctcaacgatggcttccaggatgcccagggtatcctttggctgaaccttcttgcccatgaaatcaccggtgttaacgatgtagcagtcaacgttcttctcttcaaccaattttttgaatttctcatagtcattggccaaaggataggttctgaatgggtttgcataaggaacaacaaccagcttgttaggatctacgccaggagcaagacgctctgcggaggatctcttggtagctaaggtagcgcccataacagatgctaaagaagcacctttcagttttactacaggaggaatggttgggtctttcataatccagaagatggcattaaccggagagtcaatcttatctacgcggttaggagaccacagtttggatttgatagcacgtccgtttccgttacggatatcttcggtaaccagctgaatgtttccatcttcgtccatagtagcggagcagttctgggcagtcagcaggaatttgttgtcttcacatccagtaggatagtcagcagtcttgtcgaaataagtaggctccagagcgatggaagcacaggtttctgtattgatgatgaaggcatcatcatgaagaaccttgatctcatattttccgccatgttttgcatgagtcagagtagattttccggatccggacagaccatatacagatgcaacgtatttggatccgtctgccagagtgtattctttctggccgccgtggcaggatgcatagccgttgcggttagcgatcgcccaagccatggtcagagtacctttcttgtgctctccgaagtatctcataccaaggatgcaggcacagtttgtctctgtgttgaagtagcacagagtcttcttagccgggtcgcttaagcagtcatagcttacgcctggacgctcttccggaatccactgaggatcagagaagatatagatatcagactctttgccttcgcctactggctgggactctttgtacatcagattgtactgatcagacatgtactggaagttcagcatccagttgtacatgatgttctcttctccttctggaatgagaagatgagcttttaccatgaattcaggatccagacctacgtatacttctgcatggtacatggttttccagcgggactcataaacagcgtccatagcaactttgtcaagagcttcacagtctactcctggctcgcctgcgatgcggcgtgcagttgcataacgtccagtgatggcaccatcgttgaaaagaagaacctttgcgtctttttccagaccgaattcttctcctctgtatacaggcatgtcagtcactacggttcctggggaatttttagctaattcgtatgcctgtttcaaagtatttacctttactacgttgtttccgtagaaagctgcctcaataatagaacgggttttagaaaaacctgttttgccttttccaatttcgctgattggataatacgcttttgttgacatatcatttcctcctttagattatcgaaaatcatagttattatctcatttcatttcagaaatgtcaatactttcacaatcaaattgtatgactataaatacaaaaaattatgaacattttatgaaccagttcacaaatggcttatttaaaggctttttcacccttccaagctggaaaagatcaagaaaatcctcaaaaaacatcagacaatgccattgagcttctgatagagatcctttgcataggtatccgtcatcccgctgataaagtccgtcaccagcaaaaagcgcagatacagccgctcctcttccgtacagcccttggcatacatatggtaggtctgccggtaattttcagacaccaggctgatcatcttcttatccatcatctgcatgggcacctctgtgtcatagtacactgccgcaggcaccagacggtccagcagaaaattcaaaatggttcccgccgccacctccagctgaagtatgggctttgaggtaaacgcatagcggtaggcaatatcccccagtgcctccatcacccattccccataggtaccccagaaaatatcctggggataggagccctccatgatctgctcatagttcctggcaaacccttctgtggcacagaagatcaaggcactctgcaggcgcaccacccagttctgcacagcatacagatgaacattttccacacctctacagatgccgttctcatactggtggtccagcattcccacagggtctatgcggctgctctgccctccccccttctcctgccactgcaccagctccaaacgaaggcgctcataggagatacagcccttcttaaaggcatcctccatatccgcagtgcgataggcaatgtcatctgccgcctccagaatgtaggtgaggggatggcgttttccttctgatcggcaggcaccggcaatctgcccgtagagctcctgctctgcatagaaataccccatcttcttgctcttgatattcccgctgtgtgggtcgatctgtgtggatggcaccggatatttgataatggtgttcaaaagtgcgcaggtaagattcattccatgttcattcacaagaaaatgcagcttgctcacctggcgcagggcctgggcattgccctcgaaatggtagaaatcctccgccatctgaggggtgagcacctgggtcaccggccttcccttataattcaggttccttaaattccgcacaaaccagtcccggatggcctcctccccgaaatggccgaagggcggatttccaatatcatggatcaggcctgcgcactggagtatgtcacagatatctgccttaatgtgcagattaaattctggatccacctgattttcaatcaaatactgggcaatgttctgtcccagggatttggcaaaggaggacacctccagggaatgagtgaggcgggtgcggataaaatcgcttttatccagaggaaagacctgagtcttatcctgcagccgccgaaaagaggagctgccgatgatccggtggtaatccttctcaaactcactgcgcaggtcactgctttttccagaatatggggttccataggtaccgatccgtctgggagacaacaattgattccaattcatattaaattcctaaaatgtctttcacggctgcaggcatgtcacaggcgtccaccacacggtcatggagaataggggctgtgcggatctcctccacagcctttggaatgtccacgccggagatggtgtgaagggcatctaccagggcaaaatcatccaggccctcataccggtcggagatggcgctgaccacgcttctgttaaatttgtaggggctggccgtggatgcgatcacagccggcttattgtccttggtatccttcaggtacttctggtacacccctgccgccactgcggtgtgtggatcgatcacatagccgctgccataataaactgcgctgatggcctccctggtctccccttcgctgcagtaattcccgtagaaatcacaaagctgctccttcatctcctgtgtgatggtgtaagagccgccattacccagagcctccatgaactcccggcacttgtctgggtcatttcctgccacacggtaaatgagacgctccaggttgctggaaataagaatatccatggacggagagctggtgagaaggaactctctctttctgtcataagttcctgttgcaaaaaagtcatagagcactttattttcattggatgcacagatcagcttatcaatgggaagtcccatctgttttgcataataagcggccagaatgttcccgaaattccctgtgggaaccaccacattgatgctgtccccgtccgcgatcttcccctgtctcaccaaggtggcataggcatacacataatagacaatctgaggaaccagcctgccgatgttgatggagttggcagaggagaactggaagcctgcctcatccagctcttttgccaggttcttgtcattgaacatcttcttcaccgctgtctgggcatcatcgaagtttccagtgatccccaccacataagtgttctctcccttctgggtgagcatctgcttctcctggatggcactgacgccgttctttggataaaatacaatgatcctggttccgggaacgtccgcaaagcctgccatggccgcttttcccgtgtcccctgaggtagctgtcaggatcacgatctcattttttacctggttctttctggctgccgttgtcatgagatggggcagaatggaaagggccatgtccttaaaggcaatggttgctccgtgaaacagctccaggaaataaacaccggcagcttcccgaagaggagcaatgtcacgggtatcaaatttatcatcataggccttagaaatacagctcttcagctcttcctccgtaaaatcagtgagaaacaggcgcatcacctcataggccacctcctggtaactcatctgcgccagctccttcacaggaaccgaaagagcagggatctgggtgggcacaaacagccctccgtcatccgaaagtccttttaaaatcgccgcagaagctttgacagcttcctcattccctctggtactcttatacaaaacctgcattttgcctcctacctttctacgctttcatacgttacaattttttcataatgattgattatagcagaaaacctttcccaatgctacaaaaaaaatccttgagtttccgcagttctatccacacaaccttgagtttagctgtgttcttataaacaactttcaataaatgcctaaaatataaggaatcttcctcctttttgatgtaaaattaaatcaccacaaaataatccactaaacaaaaagaaggagattccttatggctaattttacatcaaatacttacacattgaaacgaaaaattcttacttttacaaataaaatttctagactgctctccaaacctgaacgtaaatttactgcggatatcacttacggcatgttggcggctaaaagttgtctcttaacagatgttgttgaccagcttcacgagaattctaaaaagattaacattgttgatcgactttccaggcatctggagaaaggtacccctacaaagtcggctgtttcctatcttcagatggtgaaaaaatgggccccctctcaaccagtgattcacatcgatgatagtgatgttgtaaaacccgatggttataaatttgagtcacttggtattgtccgcgatggttctgaaagcacttcgacaaaaaatatatacaaaaaaggctatcatgtcacagaagcttgtgttcttactaccagcaatcaccctgtcagcatattctctcgcattcattcatcttctgaaaaggactataaatctgcaaatgcaatcacttttaatgcaatggaacagggcgctgcactctttggaaaagcgactttttgcatggaccgtggttatgacgataacaagatgttcctaaaactggatgacctgaaacaggattatgtcattcgccttacttccaaaagaaaacttctgtaccatggaaaatggactcctgctaccgaacttcgcgatcgtagaaaaggcaagatcaaaaccagtgtattttataaaggaaaaaaacatgaagcctatctttcccatgtgaaagttcagattacagcatccagaaaagagatttatctggtacttgtttatggcataacagaacatccaatgatgcttgccaccaacaaagaaattaaatcgaaagaagatgtaattcgggtggcaagaacctatttttccagatggaagattgaagaatatttccgttgtaaaaagcagatgttccaattcgaaaacttccgtgtacgaaagctttgtgctatcaatgcgcttaacttttatatcaccctatgcatggcatttctggcaatgatctcaatgatttcagaaaccaatgcactaaaggctgcaattataaaaacagcagatcctgtaaaggaaaaagttttcttctgctattatcggcttgcgaaaggtatctctggcatactttcgtatgcaaaagagggcgtcaggctctggttccggacaaagagaccggcataccgtcaactctgccttaagttagccgcttaaatagataaaagaatagttctcccaaagtccggttccagcggggcttatttcagtgcgtctgctcaacaggctgttgttctttttctttcaaaaatccagcaggttggtactttgggaagttatatctattttgaaattacattttgcggaaactcaagaaaaaatcccgaaagcacacagtctttcgggattttccccttcgttatttcgccgcagtgtcaccggcgtcgttttttaccatttccactgtgttcttgtcttttgaggatttctcctgcacttcttttgcatctcccttttcgggatatgtatagaaatcatggtttccgtggcggaataagaatttcatgtcggtcttaaaccagcttacattctcagactccgcctgttcctccgcaatgaagtacaaggctccctgggaatagtccactccgttgagagcctgcttcacagcctccctggtctcgtccgagatcaccacggttccaatccgtccgtcataggtaggggaaaactgaggcgcacccccggagtcatcccaaatgacctcggatactgtactgggaaacagatcactttttacacgattcattaccacattggcaatcagaactttacccttcaaatcttctcctgtggcctctgcttccacaagagccagcaatgtttcataatcatcatcagacatcattttcggagtctgaaccaaatttgctgactggttctccagacgattcaccgcactctccatggagctgctcacattcacttcgtttgctgccccgcttaccgtctgaactctctgacccacgatcacctcttcacaggaagtgccgatccgttccacgatccttccctccctgggggcctcgttcaggccggagatcactcctgccagtccgctgggaattttcacctgggtattctgctcctgagaaaccgtcttagccgtctcagttgaggcaaatacctgctcttttccgctgtcaccgaccatacgaataccaatagaaagcagaacaaccagaaatgccagtccgcccactacaaagagtccgcttggaaaagcattcttattctgtctttgtttcatattccgccgattccgcgagattttcttcttacttttcatacccttcattccttgcgagatattttcgatttttcatcatttgtttcatatttcgtaatacttttgtaacttacaagaaaattatatttaataatccagaatatgtcaagcagatttttacaaaaatgttaaattttcccagtcttctgtaggtaaaatcgtaataatttttctaaatccggcaaaaaagttccttagcggttattaattgccgtcacaagagcgtcaatggaagcacggataatatccggatccacacccgctccccaggaaagactgccgtccggcttctggatacccacataggcgatggccttggagctggagctcttctccaaagcatgctcctgataagtgaccagactgtatttcagctcgtaagccttcttcagtgcattgctcactgcatccagacgtccgttgcccacaccctctgtggttatggtcctgcccttgaaggtggaggtcacctgggtgatcattccgccgccgtccttctgctggaaatgaacctcctgaatgctgtatggctccaccacattttcaaaggtcttcttaaacaatgcaaagatctcatctggcagaagctctttgtgcttgtggtcagatactgccttagccacatagcccatagcctcccgcattttggcaggaaggttcaggccgtattttgtctccagaatgtagcctacgccgcccttaccggactggctgttgatacggatcacatcggcatcgtaatttcttcccacatccttgggatcaatgggaagatagggtacggtccagtgattggggtctctctcgtcgatccagtgcattcctttggcaatggcatcctgatgagaaccggagaatgcggcaaataccaaagagccgctgtatggacttctctctcccacctgcattcccgtgcacgcttcatacacctcgcacacatggggcatgtcggaaaagtcaagcctgggatccaccccctgggaatacagattcatggccagggtaacgatatccacgtttcctgttctctctccgtttccaaacaaggtaccctcgatcctgtctgctcctgctaaaagccccatctcggagtccgcaacgccgcagcctctgtcattgtggggatgcagggatacgatcacattctcccggtacttcaggttcttacacatatattcaatctggcttgcatacacatggggcatggaaagctggaccgttacaggcagattgatgatcgccttgttctccttggtgggcttccacacatccagtaccgcattacatacctccagtgcatattctggttccgttccggtaaaactctccggactgtattcaaactggaaatttccttctgtttcatctgcaagtgtcttcaaaagggcagctccatccaccgcgatcttgagaatctcttcttttgattttctgaatacctgctctctctgggccacagaggtagaattgtatacatggacaatggctttgggagcacccttcacagcctcgaaggtcttgcggataatgtgctctctggcctgtgtgagcacctggatggtcacgtcctcgggaataaggttctcctcgatcaaagtacgaaggaattcatactctgtgtcagaggcagccggaaacccaacctcgatctccttaaatccaatttcaactaaaagcttaaaaaaatcaatcttctgctccagactcataggaattaccagcgcttggtttccgtcccgaagatctacgctgcaccagataggtgcctgatccacatattctttttctgcccagttcatacacctttcaggcggcagatagtactgtcttttgtacttgtgtacattcatcataattattttcctccctgaattctgtcgcatttttcagtgaaaacacgcgaaaagccttgtcgtcaaggagcttttacccctggtcagggtaaaaaaaagcgaggttccgcctggaaccccttatattctccctaaaacgctctaccagggctgccttttttcttcccaggaaaaaacagcactctcccttgccctagtaatgtgtattataccaatttttttctaataattcaatatgattttctataatccgtgaaattataccaaaacacagccgggaagccccgccctttttggaccggttcccggctctgcctgcttctttctgggatcttagattcccagtgcaatttccatcattttgttaaaggaggtctggcgtgcctcggcagaaattgcctcctcacgataaatatggtcagaaatggtaaggattccaagagcctgtttgcctgctcttgcagcattcatatacaggcctgcacactccatctccgcacacagaacgcccatttttctccagccgtcagatacctcaggattgtcactgtagaacacgtctgaagacaccacgttacccacatggaccggtgttccctgttcttttgcaacctctacggctctggacaccagctcatagctggcagtgggtgcgaaggcacccggcagcttatactggctggcatagttggaatctgtgcaggctcccatggcaatgaccacgtccataacattcacatagtcctgaagggcacctgctgagccgatgcggatgatcttatccacatcatagaaatgatacagctcatagctgtaaattcccatggagggaattcccatgccgccgcccatgacagagacctcctgtcccttgtaggttcctgtatagccgaacatgttgcgcacagtattaaagcacacagggttttccagataggtctctgcgatgaatttggcccggagaggatctcccggcatcagaactttttttgcaatgtctccctttttcgctgtgttgtgtggtgttggaatacacatacgtttttcctccgtttcttatagttgttttattttagtacttccttaaggaagctgtttccttcaatatttccttcaatgtcaaacacgtccagcacagtggcggctatgtctgcaaaggtgggacgggtgcccaggtccacccctgctttgatgggttctccataaatgagcatgggggtatattctctggaatggtctgtactgcaggtaaatccagggtcacacccatggtctgctgtgatgatgaggatatcgtccttcttcatcttactcatgaattctcccagctggcggtcaaattccgtggcagcattggcatagccgtccacattgttcctgtggccaaagaccatatcgaaatccaccaggttaacaaagcaaagacctgtgaaatcctcatccatgatcttcaacgttttgttcattccatcctggttattttcaatggaagtagtcttctgcacattttttcctgcaaaaatatcatagatcttccctacaccgatggtttccagaccatgctctgtgagttcatccagcatggtggtctttgggggctctagggaaaaatcgtgacggtggggtgttctttgataatccgggtattctcccacaaagggtcttgcgatcacccggcccactccatgtctgcctcttagtatctctctggcctgacggcagtaagtgtacaggtcctccaaaggaaccacgtcctcatgggcagcgatctggaacacactgtccgcagaagtatagacgatcaaatctcctgtttttacatgctcctggccaaactcctttatcacctctgtgccggaataaggcttgttgcacagaacgcctctgcctgtagccttacgaaaaggctccagaacctcctccgggaatccatctgggtaagtgggaaggggatctggagagatcactcccgcgatctcccaatgaccgatggtggtatcctttcccatggatgtctcctgcattctggcaaaggagcctatgggactgtctgttcccggggcgcagtccaccccttcaatattaaaaaggcccatggctttcatatttggcgtatcatacttgggtgacttcacaatggatgccagtgtgttggcgcccacgtccccaaatttgtctgcatccggctctgcgccgatcccataactgtcaaggacaataataaatactcgttttgctttcaatgtcttacctcctggtttcttctctatcaattgtcagtaactgacctttgccttcccttttcctctggctaagagggccttctgcagtctcacggcctcttccataagggcttttgtgtccattttcagttttccgtcgtacttcagaaattctccgtccaccatggtgtattttacattctggctgttgctgctgtacaaaatggcggagatggggctgtagaaggggaaggtgtccatctggtgtagatcccagatcaccagatctgcaggcgctccctccttcaggcatccgcttccgaagggaaaggcctgatggcccgccatgagatgctgccagatctcctctgcggtaaaggcggaggaatctctggccccgaatttgcccaaaaggccaaagagccttgcctgctccatgggattcagggtattggagctggctgccccgtctgttccaaaggcataattcagttttttatagtgatcaaagaagcctcccctgccggaagccagcttcatataggtctttggacaaaaggcaaaccaggtgtcctcttttaaataattcaggtcctcttcctcgatccaaaggccgtgtccaatgagcaccttgcagtcaaaaccgcctgcctcataaagaatgccaaagggagtaagtcctgtctcctgtctggccttctccacctggacatcctcctctgacacatgaagatgaatgggcagcttcagccttttggcctcatctacaatctgtcccagggtgggaggcgggcaggtatagttggcatggggccccatgtggaaggccacccgggaggaatcttcccggtgattttcaataaactctgtcacctgggccaggcgctgggggaattccgggtctgccccgaacaacgtgggggccagatctccccggatcccagtctccttcacagcctggagcacctgctcctccccgaaataatggtctgcaaaaaccgtcactccgttgttcagcatctctgcgatccccagcagggtgcccatatacacatcctcattggtcatcttgctctcatagggccagatcatttcattgaaccaggcatctgctgtcacatcctccgcgattcccttgaagatattcatggccgtatgggtatgcagattggccaggccgggacttacgtaatagctgccgcatggaatgatctcctgggcagttacccctgcatcgtccaggtctttgtctgtgatcttcaggattttcccgtcctgtacatataaattctggtggcggatgcaccgggcctgctcatccagcagtgtggcatcctttaataagatagtttttcccataaattctcctttccatattgccagtaatttggaactgtgatagcataatcaagtatgcctatgattccattacagcaggagcatcctgcgaagataaaggagctcactatgaaaaaagttttagtcattggttctactgtggtagacgtgattattgatctggtggaccatcttcccaaaaccggggaggacgtccatgtgcgcagacagcacatgtctctgggcggctgcgcttataatgtctctgactccatccgtcatttccaggttccctaccttctgttctctcctgtgggaaccggcgtgtacggctatttcgtccgggaagaactgaagaagcggggcatcagcacccccatccccactccaaaccaggacaatggctgctgctactgctttgtggaaagcaacggggagcgcaccttcatctcctaccatggagccgaatatttgttccgtaaggaatggtttgaccggatccccctggaggagatcgataccgtgtatatctgcggtctggagattgaggaggtgacaggagaagccatcattgaattcctggagaaaaatccccagctcaaggtcttcttcgcccctggccccagactgaccattatcaaccccagccatgtaaaccggctgtaccgcttatcccccatcctccatttaaatgaaacagaggccctggaggcaagccggcttcccaccatctcccaggccgccgcttttctctacggaaaaacccacaacactgtgatcatcactctgggagaaaagggctgctattactttgacggtgataaggaagagatcattcctccggttcccaccgcccagatcgacaccatcggagcgggagattctcatatcggctctgtgatcgcctgtctgaaaagaggggcttccctgccccaggccatccggctggccaaccgggtatcctccgctgtggtaggtacgcccggcgccctgctggatgacagagcctttgaaaatttaaagcttttttagaaggaaacagcttcgccctgagccgaagctgtttttcttattctgccctgccttacagtttttcaaacctaaggggcaggccgcgaatgtatttcctattttccacttaaacgttcctttttcttcttctgggcataatagtacacgcccagaccaacgagagtcgtcagataaggcaccatgaggatgatctcataaggcataaccgcagtgagctggaagatgttggccaaagcctgggccagaccaaacagcagagataccaggaagccgcccacaggggtgttgccgcccatgcttgccgctgccagtgcgataaagcctcggccgccggacatgtcctttgtaaacatgttcatataaccgccggagagatagaaaccacccatagctgccagagcgccgctgatgatcagggcaatgtactgaatctttctggagctgatacctacggattctgccgcgtccttattctctcccactgcccggatggccaggccaagaggcgtcttgtataaaaagagatgaaggaggagcacagccagcagggccagccaagtgagcacgttctgtccggaaagcacatctccaataaacgggatcttttcaatgagaggaatggtcacattgggcgccgacacacttcggatggaggaggacacacctctgtctccggagaatgctaccaacagaagaaccgttccgcctgtggccgtcaggtttatggcaatggccgccagaatctcatcggtcttcagcttcagcacgaaaaatgccagaaacagtccgatgaaaccgccgatggccatggttatcaccagtcccagccacgcactgtgggtcagggaggagaaaatcacgccaaacagggcggaaaataacataataccttccagcgccatgttggtgatgccggactttgctgcaatgcctgccgctaatgtagcaaacagaatgggtgtggtggccctcaagatggccccaaagaaatcaggggataaaatcgccttccacatactatgccacctcctcttctttcaaagctgctttcgcctctttggctatcatcttatgtttatacttgctcaggaactgttctgccacaatcagcaggataatgataccctgggtgatctgcacgatctccagtgtaacatcggtccttcttgccatgatggaagctcctgtacgcagataagccagaaacagggctgcaaaaggtgtgtacagaggattttttctggccagggtacagataatgatagcatcccacccataacccagaagggaggtccaggtaaacctgctgtaaatagggctgagcatttccacgccgccgcccaggccggctacaaaaccacccagaagctgggagatcaggatcaccttcacaatactgatgccggaatatctggcaaattcttcattttcaccggtcaggcgaagctcatagccggttcttgtatgatataggaagaaatagcccaaaaccgcaaccgcaatggcgataacaattcccagatgcacacgggttccctggagcagcaccggaagctgggaagcctcagaaagcttataggaagccgcactggccttggggtcgccgatcacgttgttcaaaatatagtttccaaaatacaaagccagatagttgatcatcagggaggataccagctcattggcagtggtggcaattttcataatagccgggatggctgtgaagaaagcacctacgatacctgcgcacagaagagcggcaaccggagatacaaagctggctgtgagcttgatggcgatacaggaagcaatgagaccacccacatggaaggcaccctcacctgccaggttgatctggtttgcagaaaacatgatacatacgccggttcctgtgaagatcagaggaatcatggactctaccacatttcccatatttcttttactggtcaagggaccgatcaacagatttttaatggcttctacgggctgtttacttaccataaaaataatgacaaatgagatggcaagtgcaatcaggactgaaagaatggtccgcagaatatcgaatttctttgaactactcatacattactccctccaatacttcatctcgcttaatgcccagcatgtgctgtccaagctcttcctcagtaactccatccacatctgtgaagaatcccgcgaattttcctttgtacataaccgccaggcggtcgcttaaggagaaaatctccgtcaggtctgcagagatgaggatcactgcacagcccgcatccctgaattccagaagacgctgtctgataaaggcggccgcacccacgtcaatgcctcgggtgggctggttggcgatgatgatatctggtcctgtggaaaattctctggctacgatcaccttctggatattaccgccggagagcattcccacattctgctttctggatttacatttcaccagatattctttgatgagctcatcgctgcgctgctcaatggcctttttcttcagaaacatctttccagaaaacttgggatccttgtactggttggagaacatgttttcctgaatacttaagtttttggcacagccggaggtcatgcggtcctcagggatgtgggccagcttcagggaacggatgtcgtcaatggaggcattgagaatatccttccctttgatttcaatggttcctttatatttcttattaagccctgtcagagtatcaataagttccgtctggccgtttccttccacacctgcgattcccaggatctctcctcccttcaggtcaaaggaaagattgtccacctttaaaacgccctgggcattattcacagtcagattgcggaccttcatgaaaatgttgtctgtcagatgctgttcattcttatcaaaatgcagagaaacctctctgcccaccataagctttgacatctcctgagtggaaatgtccgccacgtcataggtacccatgctgcggccgtttctcataatggtggcccggttgcagatctgcttgatctcatccagcttatgggaaataaagattatggtatgtcctttttcacgaagctttaccagctgtatgaagagttcgtccgtctcctggggagtgagaactgccgtgggttcatccaggatcaggatctcggcacctctgtacagagccttcaaaatctccaccttttgctttatacctacgggaatctcttccaccttgtcccgcacatcaatatcaaagttatattcctttgcaatattctgggctgattccacagccttgtccatatcaataaagatacctttttttggcgccacgcctaaaataatattttcagccactgtcagggagggaaccagcataaagtgctggtgtaccataccgatgcctttgctgatggcatcctgcgatgatttaatgactgttggctgtccgttcaagataatttcaccctgatcaggagattcaattccaaagagcaccttcatcagcgtactttttccggcgccattctctccaagcagagcatggatctcgcctttgcgaagctccagggatacatcttcatttgcaaccacaccatttccgtagatcttcatgatatggttcatctgtaatacaatctgattatccaaacctgctcaccccgtctctttctaagcaatttttttattttaaaaaagcaaaaatccagctccgggcaaatacccggaagctggattttcaatgcccatgaattacttattttaccttaactgagtcaattaattccttaatttcatcctggcttaatgcattgtcgccaagagcggtaggaactaccaggtcaccgcttgtgatctgctcttttaattcagcaacctttgttctgatagattctggaagcatctcttcatagtgtgcatcctctactaactcaacgccgccctctgcaaatcctaagtactcaagctttccatattccagcttgtcttccatgtccaatttgatggcacggatcagggagtttccaacatttttcagagcggaggtaggaatgtactctgcatagtcgggaagcagagctgcctggtcagagtcaacgccaaatgcatattttcctgcatcggcagcagcctcgatctgtccaagtccggcacttcctgccacgttgtagccaacgtccgcaccgttctgatactgggtcagagccatatcttttcctgctgcagaatcatagaagttgcccacataagccagggctacctgaatatcttcctcgatatcctttgcaccctggatatagcctaccaggaagtcattgataacactgttctccatgccgcccaggaaaccgatcaccttgttggagggatcaactttatccagttcctcacttgtggtcatcattgctgctgcagcgcccaccagataggaaacctcgttctgtttgtacattacattgtaaacattttctccgccttctgcgtaatcaaaagcttcatcaaagtagatgaatttctgatccggatagtctgcggaagcttttgtcagagcatccagcatctggaaggtaccaacaatgataacatcataggaaccgtcatcacagtagtcataaacggtgggctcccattttgcctcgtctgcagaggttgcgcccatctgctctaccttgaaggtgaagttgtcctctcccagttcatcctgaagagcggtgaggccattgtttgcggagtcaaagaaagatttgtctcctaaggtaccattgatgagaagagccgccttgtagggatctccgtcatctgccattgccggtacggctgcgacacccatggacagtaccatagatgcggacagtgctgctgctaacatttttttcttcatattgtgtttcctcctttttattttgctttttcagctttttttatactggataaagtatcttgaaccaattcctccagggtaatcttccggaagcgtccccgcatgtaggtttccaactgggagaaagccgggtggatcagttcgtttggaatgatacgcattccctgttgaatagtgagaagcggcatgatcatgccggcgttgcagtccacatcgatcccgcacatggtgatgatgtggagagtccggctgaaatccccgtttccataatataaagcgattatttcacagcaggcattgggataggcatggatccagttgtatttcttgtatttctcctggcatgccttcagcgcctcctgccagttctcataatgtgtacagcaatcccaggcaaatgagagcactgagtaatactcgctgtcctttgggatcacatccatagccagggtgaccaccctgcggatatccttttccacaaaggccagggaagtcataactgcattaaacacctctcccaggatgccattgttggcatgggacacctccccgtccttccaggccagctctgccgccagggccggatttcccggagccgccattccgcagatgcctgcccgcatctgggcaccgatccactcattgaatggatttcgccaggtaccgctctggggcgggaatattccattttttatattccggatggcgatctcctctgcagaccagccgcaggggatcagtcccacccaggacagggcaatgtcctgtgaagtaacctgatagcccttcctgccaaaagcgtccagaaaggccagctcaaaagtaatgtcatcattgaaggtattgggctctctgagatacccatgtacctccccaaaggcggcatagagattttcacaggtatagccttccaccatggtccccatggcccctccgatcatctgggacagccatgccccgtggattttctcccggaactcttcgctgtctgtgtccactgctgcagcctcaggaaaggtcacagccgaggcatattcctcataggaggtgtaggaatgatagttccagtaaggagaagactcatctttctttgccatggccagttcccgccgcagaagggcggaaatttcatgaagacggacaaaatccttctcctcatgagccttcaggccctcctccagaagacggtaaccctcctcactgacctggtaccctctgttttccagagcctgcacagccgccaccatgatcttctccggagccccggagccgggcacattgcttccccagtccaaggacagattgttgtcataaaattccgacacatccacattgtctgtccaggtctgctcctcctggctgcggatcactggccgggcctgtgtaaaaacttgtcttgcaatttcccatgctttcataaatttctcctaattgtgtcaactttagcaatttttctcccgtttaaagacaccggggaaatccttcttgatgcacgcttgttatttctttgttcttatagacaattttgctttaatagttttattttacaatagttcccaggaaaattccatagaatttttgatattttaaaaaattaattattttaacatatcctattgaaaatttataggacttatgtcatattaaaaaagttaatttccttctttcacgaaagaaaacttttttcatcaatgtgacatatgtcatatgttttttcctgttaatgtaataggataggtacagaaagaaacgaggtctctcatgatacgcaaaccattccatgaacaatatatccccgtactggaggaattcggactctctgaattccccagagagcttctctccctcatagagtatgacaaaaaagaatacatctatcaggaaggctgccctgtgaagcatctgctcatccttcttgagggaagggccaaggtggtcaccttcacagaggaaggccgcaccctcatgcacagcttttccgaacggggaagtgtgctgggtgaggtggaaatgctcactggcagtgaaggagccgccctgcatgttcaggctgtcacacccgtgctgtgtattgccatccccctgcctgaaggcaccaaagcccttcgaggcagcctgcagttcatgaaccgcctcagcatgattctggcgaaaaagctgaattccaccaattataactcttcccggatcattctgtattccctggaaaaccggctgtgctcctatatggagatgaccagcagcaacggctatttcgaagagcagctcacccaggtggccgaactgctgggaaccagctaccgccatcttctgcgcaccattgagaagctctgccaggaacagatcctggaaaaatcaggaaaaggttattttatcttaaatgcccaggctctccatcagcggggacggggcttttattccgcaggactataaactttacaggaggtacctctgtatgtacgcactcttcaccttatttgccggcgcctgccagtcggccatggccagtcttaacggcatgatcaccaattatctgggcatgttcgggatgagcctggtggtccacctcatcggcggcgccctgctgatcctctatatgaaggtattcacccatgaaaagctgaagatcaccggaatgccctggtatctgtattcagcgggcttcttcgggattttcctggttgccagctccagctactgcattggggtcctgggcgtttccgtcatgacctgcatttctgtcacaggccagatggtcatctccgcagtgatcgaccacttcggatggttcggtgttcccaaaatcccatttaatctaaagcgtcttccctgctttgcactgatcctggcagggcttatcatcataaacctggcttaagagtccacgggatctttccagcgcccatacactcatccagcctttgaaaggagtctcactatggcttttgtattaaccctggcatttgtcaacggatgtgccaccgtcatttccaaaatgatcaattaccggtgcaccaaggttctgggcaccaacaatggctccctggtaaactatgtggtagcctctgtcttgtccttccttctgctgctggctgcctcccgcttccacattgacttctacgcatttgcgcaggctccctggtggatgtatctgggcggcgccttcggcattgtggctttcattgtctccatgatcaccctgtcccacctaaaggtcatggaatccaccatcttgctcctggtaggccagctcacggcagggatcctctttgacacctttatgttccagaacatcagcgtgaaaaagcttctggggatcgccctggtggcagcaggcattatctgggataataaaatctcctcctcggaaaaacaggcctgacctcaaacctctgtgaccatggcatgaagagcctccagatccaggatgcggatacggtttctgtttcttgcgagcactccttcttcttccatggcgtggaagatccggttgagatgccgcacggacactgagcattccagagccgtatccttgcaggaaatggtcagggccgtctcgtgggtacaggagctaagctcatataaatactgggccacccgcaccttggcatcgaaaagtcccacccgcacccgctcctgcccgctctctgtcagctcccatccaagctggcggcagatgaaccgcagaaagggaagatgattcatcagcttcttctccgcgatctctatgggtatacggaaaatcacagccttctgggcaacggacacactgtggaaaaaatcaatttccgcagcgatctccatctccccgataaatcggccgggagggatatgataatcaatggaaatctcttttccctcgctggtgccgttggagatcctgcactgtccctccgcaagaaaataaatggcgttcaccttgtctcctgcatgaaacaggaattctccctttccataatgctcaatggtcatatcctgagggtccagacaggaaaattcttcttccatatccaaggccttcaaatacttctggatgatttcctcttttctcataacaagtcttgtcctttacttcttgtccgcccggtatctccctgacggagcaaggaggatcccaggcttttagcacctgcgtctctggacggagctgtttgacctggctgagatatacctaatatatacacattggcgggataagaatcggacatatgtccgattttctcatttttgacatttttcatagtttttcatgcgccattttgtgcaaaactgctaatttttgcttttcttccttttatttctctgcccggtcttttgcgatcaaattgcgcagagctcccacgcctacacgcactgccatatctgtatcatgggcctggggattatccagtccctgctttgcccgctcctggttggcaaccgccagaaatgcggaaccgcaccgcacccgcagatagctggccacagtaaacaaagcggcagattccatctcagaagccagacagcccagcttcatccaggcatcccatttgttcaaaagctcataacccacaggctttgtctcaggagaatgctgtccatagaaggaatccttacactggacaactcctgtatgataatttaccttctgctctctggcagattccaccagggcatttacaacatccagattggccactgcaggaaattcaatgggggcatattccttgctggtcccctccatacgcacagctccggtggcaaccacaatgtctccgccctttaccttgatatccatccctccgcaggttcccacccgcacaaaggtgtgggctccgcactgtaccagctcttccatggcaatggatgccgaggggccgccgatgccggtagaggtgacacttaccttttctccgtccagatacccggtgtaggtcacatactctctgttgtccgcaatcagcacgggatcatcaaaatatttcgcaatggacgcacaccgcttgggatctcccggcaggatcacatactttcccacctctcccggggcaacatgaatatgatacaattttccatcgtttgagtacaccatttaacatacctcctctaaaatcattcatctgatattaagacctccagagactggaaatccaagatccggatctttcttccattctttcggatcatgcctgcctcctcccactcccccagaactctggagagctgacgttcggaaatgcctgcgtccctggccgtttcccggcaggaaaaggacacattctcacttttctggtctcttgcctgcatccacaaaagtctggccacccggctcttgccgtccttcaggatcacctgaatctggtgggaggaatctgtgtacatttttcccgccatctcctttgtgagaaacctaagaaattctacccggtacaaaagctttgtctccatgagcttcttgggaatcttcaggaccactgccctgccgcaggcggacatgctcagcttaaattccactcccagcaaaatttccatgtccccgaacaggcccagggcttccttataatttaccagtacctcttttccttctctggaaatattatacaggcggcatctgccttccaccagaagataggcatagtccacatcctgtcctgcatggaacaggggctctgcatcttcgtagatcttcagcaccagcccctcctgcaaggttccttcaaaggctttttccaatttccagattttcagatactcttccactgttttcatgttcttttcttccctgccaggcacctgatcaaatgctgagcctagtatagtttcttttgtttgatctgaatcggacatatgtctgattttcatcaacttcgactttttctccagttttttcaagctggttttgtgcaaaacccacaaggattttctatttttcctctacagccctctgcacacatgctccacttcttccagtgcgttttccaaaatcgcctttccgtccagctccgcaatatcaatgccgtccgcatacacgcagaaataactgtcgattccgaaaaattcacagagagcctccatataccggctgccctgctccagatccgtcccctcccagattcctcctctggtggtgagaaacagcagccactgacccttgcagattccctgaagaccgtccggcccggaggtaaaggtaattccgtccgcagaaatattctcaatatatacctttaaaactgcgggaatactcagatcccaaaaaggcgctgccacgatcacagcgtccgcctcccggaactgattgccgtaggcaaagaccggatggtcatattctttctttgccagcagggcatctctgtcctttaaggactgggtattccaatatttcaaatctagatccatgagcgtaagtctctcaaagctccagtccgggtgaacctccccaagggtttccaaagcccggtccagcagcttccttgtccgggactcctctcttcttacacacgcgtcaattacaagtatatttttcatctctctcctatccttcccggtccgccgcgtttcagatcccccatgggccgtcccatctctaatgcttgctatgcccctgggggtcttagccatgggtgcgccctatagggtatgctttgtaagacagcagacactgaaaatttccttacagctatgggaattttcattctaaaacagcttttccccgccgttattgtatttattatatctgttttgtatatttttcacaagtgacattggcaacaatttcagctatactgagagcaaaaggttacataccatcattcaggagggaaattatgaaaatccttttaaagaacgccatggtgatcaccatgaatgaaaaaagacaggtttaccgggaaggaaacgttctcatcgaagatgacaagatcacgaagatcggacattttgatccccccgctgactgcacagaggtcatggactgcaaaggaaaaaccatcatgcccagctttgtgaacacccacacccatacctcccagcagcttgccagaggcctggccgatgacgtggacctgctcacctggctgcgggaccgtatctggccctatgagagcaacatgacagaggaggattcctatatttccacccttctgttctgtgctgaacagatcaaagccggctgtacctccattgcagagccgggcggacagttcgtctccggcatggcaaaggccatcacccaggccggaatccggggaaaactggcaaaatctgtcatggactgcggggaaggcctgcccaagccctggcagcgttccacagatgaagagctggcccaggaagaggaggacctgaagaaataccacaataccgccgacggcagagtcaaggtatggttcggtatccgcaccatcttcaacgccactgaccagctcatccttcgaagcaaggagctggcggacaaatacggcgtgggagtacatatgcacattgcagaggccaagtccgaggtggaatacgccaaagccacacggggctgcaccacggtcactcacttgaacaatctgggatttctggacaaaaacatcattgccgcccatgcggtgtggctcaccaacgaagaggtggaaatgttccgcagccatgaggtaaaggtatcccacaatcctgcctccgccatgagagtcctgggctttgccaagatcccccgtatgctccgggagggtgtgtgcgtagctctgggcacggacggaacccccaccaacaaccggatgaacatggtggatgaaatgtgggtgacctctttgatccataagggctggcgcctggagcccgatgtggtgaaagcccaggagatcctggccatggccaccatcaacggcgcccgtgccgtaggcgaagaggatttatacggaagcctggaagaagggaaaaaggcagatctgatcattatcaatccagatgccaacccggacatgctcccggttcatgaccccattgcaaacctggtcacctccatgcacagcaccaacattgagtgcaccatgtgcgacggcaagtggctcatgaaggaccgggtgctcctgaccatagatgaaaaagaaatcatccgtgccggaaaggaacacgcacaggccatctgccagcggggagggatccggcttcctgaccgttttcccatgttataaacagaaattataaaaagccctctggcttgcagaaatctttctgtaggtcaggggctttttatcatgaaacgagcaactgcatatggtaccgtgcaggtacaaatcggttctcccatattgcaggtttcccttatgatttgttatactacgattaaacagaaaaggaagtgagtgcatgaaacagattttaattgtggaggacgatgccaccatgaataaaatgctttcaaataccctgctgactgaaggctacaaggtcacttctgcccataccatggcagaagcacagcagtatttacagtcggccgcatatgatctggcgattctggatattaacctgccggacggatccggctatgaagtctgcagggcgattaaagaaaatccacatacggctgtgatcttcctgacagcaaacgatttagagcaggatatgataaaaggttatgagctgggcgctgcagactatataacaaagccatttcccaaccgtgtactgcggcacaaggtcaatgcaattttctccatgttggaaaacgcccaaaaagagccgccccataaaaaatatgatgacgggcagcttatgatcgacttttcttccatgcaggccactttaaacggagagaaaatcctctttgcacccctggaataccggatgctggaaacgtttgtggccaataagggaatcatactgacacgccagaaattattggaaaaattatgggacagccaggaaaactatgtggacgagcatactttaacagcagcgatcagccgcatccgcagcaagattgaaaaaggaggcagcaagtatatccaaaccgtttacggcatgggctatctatttacaggcagaggtacaaaatgaaaaaaataagattatctctttcaggcattttccggctgatgggagcaggattcctgataacgactcttgctctgtgcatcggtatatttctgatcacaaaaaacaggaccgcagtcattgcctgcgtgatcaccgctgcagccttattcttatgggcatttctttttgtgagagtattacaagaccggctggttctttttacaaacgatgtatgccagaccaatgaccatatgatgcagggggaagccgccccaagaataatttttgatgatgataccttgttggaccgtattaaccatcagctgaaccggctgtaccagatgctgcaggccaacaagaatatgatcgaggaacagcgggctgacttacagggtatgatctctgatgtatctcatcagataaaaacacctgccgcaaatttgaaaatggccgcttctactcttttggagcaggagctcccccgtgcccaacaggtggaatatttacagtccatgaatgtgcagcttgacaagctggatttccttatgcgtgcaatggtaaaatcctcccgtttggaaacaggggtaattgccctggttaaacagcaggcatccatctacgagacattggcagccgctttaggcagcatttttttgaaagcagaagaaaaacatctgcaggttacagtggactgcccggatgatctccttgtgccccatgacccaaaatggacggcggaagcactgttcaacctattagaaaatgcagtaaaatatactccggcaggtggaaaaattcaggtgaccgttgtccggtgggaagcctatacaaaaatcgacatcagcgataccggacgtgggatccctgaagctcatcaggctaaggtctttcagcggttttatcgggagccggaggtccacaatatccagggaattggtattggtctttatcttacaagggaaatcatttcaaagcagggcgggcggatcaaagtaacctcccaggcggaaaatggtgcgacttttactattttccttccaaacgattaagacggcagacagccgtcttttttcattactttttttcattacataggatacatttctctttagaaattattttgcaaatggcaacattcttgcgacctttgtgttttatcatgaaggtaccaaaacaagaaaggtggtaattaccatgcccgtattacaaacgatggatcttaaaaaatattatcagcagggcgaaaatgtgacaaaagcccttgatggtgtgagccttgaaattaaagcaggggaatttgtttcggttgtgggcacttctggctccggcaaatcaacgctgcttcacatgatgggaggtctggatactcccacatccggcaaggttctaattaacggagaagatatttcccaaaaaagtgcagaacagctcactgtgttccgccgccgccacatcggctttgtatttcagaattataaccttgtgccggttcttaatgtctatgaaaatatggtactgccggttcagctagacggaaaaaaagtagacgaaaagctgatggcagaggttgtgggcgtgctgggtctaaaagataaattagaaaatctccccaacaacctttccggcggccagcagcagcgtgtttccattgcccgtgccctgcttaccaaaccggaaattattttggctgacgaaccaacgggaaacctggacagcaggacaagtgaagacgttctttcccttctgaaagttaccagcatggtattccatcagactgtggtcatgatcacccataacgacgcccttgcccagcttgccgaccgtattatccgcattgaagatggcagaataacaaattaagcagaggagagaggctatgaagaaatttattttactttttacatttatttttactttgtcattcactggatgcaatggtgtaaataatccagtggtacatcaagacggaaacctgatcattacaaactattccagctatgaagtcacacacaccacaatctcccacttaggaaagaccctctcctcttcccccaaagggatcaaggatactcaaatttgccgtttcaccattgcgcctgctgatgcttatgtttataccgtctctttcgtggataacaagggagaggaacacgcacaggaatttaccgataattttacccaagatgagcaaatcctaattgcaatccgctatgaggactctgcttggaccattgactatgataagtaagggggaagcgggcttatgttctataatgacactagaaaacaaatgaaagagcttgctgacaaaatcatgtctggaaaccgccgccgcaattgttttgtcatcctggccattgcaatgacaacttttcttatttctaccattctctgcattggcggcggatatttgaaaagcgcaggcagacagcaagaaatgctcaatggcacagcggcagacataatcctgacaaatccaacaaagcagcagattcaggcattacagcaggatgaggatatcctatatatgggtatcagccgtcaaatcggctttattgatacaacagcctatcctcgtatcaatagccttcttctgcgctggtgtgacaatgttgaatgggaacagcatatttttccaacacttggaaatgtaaatggacactatcccacttcccacagtgaacttctgttgcctacatgggttttagagcgaatgggtatcgatcacccggccataggccagacgatcacgctttccttccgttatggttatacggatattcattggcagcctctttcagagccaaaggatttttcttttaccctgtgcggctggtatgaggattatagcggcaacaaactatatgataatgccattgcctatatcgcagcagacttttggaaaaattctgctgcaacggaaacaaacaccaaaagcgcactatcccttacagtttcaggtgatgcgggaaataaaatttcctcgtatgtggaaccattaaatgacctccaagaaataactgacctgtcaaaagccggaagcagccaaaacagcatcagccctgtggcagcagttattgggctgatcgtcacaattatgatctgtggctacctgcttatctataatgtcctttatatttcagtgacaaaggatattcgtatgtatggacaactgaaaacactgggaacctcaaaacggcaaatgaagaaagtcatttatcgccaagtccgggtattaagcttttggggaatccttttaggtttaaccttaagtgtgactaccgtattcttcattgttccttttggaatacgggctttggcaggagaaatgatcatggacagtgccatatccccctcctattctccattcatctttataggcgcaggattattttccttcctcacagcattgatcagcagcatgaagccatctaaaattgccagtacggtatcccctattgaagctctgcgcttttccggggtaaatccttcaaagaagaaaagcagcagaacagctggcgggaataaggttttgaaaatggcggtcagcaatgttttccgaaacaaaaaaggaacgatactggtaattgcatcgctatttttagggatcagtctgtttgtaatcgtgaatggaatcctggctggattggacgcttcttatctggcagatgagtatatggaggatgatattgtcattgaagtaagtcagcagacgaaccttgaccagaaccttctcactgatctacaggcttcttcccatgtgcaggaagtatcctataccaccaagctctatgaacagtggttcattgatccaaacaatatccttgaaaagtatattgctgatttttgcggcactggtaccgttccccaggaagctgccgcacaatatgttcatgggaataagtatcagacctatgtgttcggcattggagaacaggactttcatgaagccgcttcattgatgaacagtccccttgaatatgaggactttcgcaatggaaaaatagcttttttagcatcagcgacgatcgtaccttatgagggaaccgcagtgaatggagaaattcagttagccctaaataacgaaaattattcactaaccatcgctccgtgttatttatctgccacatttaaggaaaatggaaaaacactcattgcccctaatatttatgtgagccaggaatggctggaggggatcggcgctgatggacaaatcaacaggatcactttacaaacggatcattcagaacaggcccttacggccgtgaatgccatgtttaaaaattacagcgggatcacggtcacgtcaaaggtggaaaaagtcaaggaactagaagccagcttcagagggatctcgttcttaggaaatgcgatcagtgtgatcctgctgggaataggcttaatgaattttatcaatatgatgtatgtcagtgttaatagcagaagcaaggagctggccgtccttgaaagcgtggggatgacccaaaaacaaatctgcagaatgctgcaaattgagggaaacacttatgccctcatcacagcaatattgattttcgcattgggaagcgctgtattgtatggagcttttcaaattgtaaaaacgcaggcatcctatgctgtattcacttatccattttcccaaatagccctatcactggctatcgtgatacttatatgcaatctggtccctattctcgtttataaggctgaaactggtcacagcatcattgagcggttaaggataaatgaataaaactatgatataacaaagcgggcaaacctgcttcaactcataaaaaatcaagtaaatccttagaaagccagtctcatacgagatggctttctaaggataaaatcaatgggatcttggcgatccaataggggatttccttcacaaggttaaatcgaaacaattttcatggaggaaagtttcccactgtttaaaatcatctttttatattgggaatactttgacttaggaacctgcacgattgtccccttatcaatggccatacatctttttcctatataggacaatttcaaactccttattgtaagcttatgcatccccggacacttatagaaggccgaacctcctagtctttccaaggaagcaggcaaaaccaggtttcccagtgacctgcacccgctgaatgcgcctgtactgattgtcttcacacggctgcccagctttacggttaccaaattagggcattgagaaaatgcataagggcccacatagtttacattgtttccgatttttacagaaataagatttttatttttatagaaggctttttggttaatagaagtcactttataagtaagactcataatctttaccacagctggaatcactgcagctgtatcctccttggcagctcccataacacgcacttcttgtgttcccatgatcctatatttcaagtttccaacagtataatcctcccccttttccgggcgttttatttttccggaaacgacttgggattcctcacccagatacttctggccatttacactcctgagtccttgcaccttatattcatattgaactccggcttttgcagatttatcattatacaacactcttgtcgtctttgcgatctgctcatatttactgtctgttccagattttctcaaaataacataatagctcgcatattctgcctcatcccaggatagctggatatatttcggtgttatctctgcggtcaggtttgtcaccttttccggttcacagattttccacacagcatttaccgtaagattagatgtcaccttggagaaatccttgtcccaggataaatcatagccataacgatacacaaagggataatccgccccttctcctgactccaccttttcagtttttataatcttgccccggtccttaaagataactgtaaacttctccgtgggtacaggggtgatgataatgggcggtgaaggaggcacatcagaaccattctttgtccatactgcattgatgatcatatcctcctccactttggtataatcaccatcccaggataatttatatccttctttggacaggtcaggaggtgttgcatccttgcctttaagcacataatctatctttatcgtgcggccctcatttttgaaaacaactttataatcataggagataaatggaatattatttgctgctgcgtagcgttctgcaatgctgtctttaaatccattaatttttaagttgcggcagcctctaaaagcatctgttcctatatatgaaactttttttgaaataaaaatttcattaagtgacgtacaatctttaaaagcctgttcatatatatctgtcaatttatcagacaataaaatatttactaagtgttcacatccgcaaaatactccattcgctatattctcaattttttcagggcatataaattctgtaagaccagaataagcaaatgcatacgagttaatattttttatcgtacttggtaactggatagatttcaatttgggcgttttttcaaaagcatttgcctctattgactcaataccttccggtatcacaactgtatctaaatttggtaaaccatccgatatcgcaggtatttctgtaatagttggcggaaattctatcttctctagtcctaagcaaccatataatacccaaactcctaatttttccaagctttgcgggaacactatcttctttaaagacttacagttactgaacgcttcttgttcaataacacttactgaatctggaatatcaatatctgttaaatttgtgcagttatcaaataaaccatctttaattacctctaaatcatcaggcaatttaactctttctaaaaaagtacagtctttgaatgcataggaacctatctcttttactgatgcaggaatatccatttggagtataccagaactgtagaaaaagcatgcaccaatagacgtaatatttccttcgaatttaacacttttaatattttttattttatgttcccactccgtctcgtccataccgttataattataagtacttccacttccacttaaagtaacggtatctccttgtattgaagcatatatatcttctcctactctaatcctcctgtttcctatggaagtaaatttaatacctttatattttgcatattcttcagcacaagatcctgtatatcctactatttcatttatatactgacacccccaaaacggatctttatattcaaatttccattcaaaacttatatcttcaggaaatgttattttattcaatctggagcacatagagaaagcatcaccttcaatattctttatcccttgaggaataataatctctgttatttgctgcagagcagtaaaacaattagatttaatagtcctcaaacccgaagataatttgactgtttttacattaaggcaatccccaaacccatagtaacctatttcttccagtgtatcaggcaattctatagattgtaagcctgtacaacctctaaaagcagaatctcctatatattttaatccatttttaaagtttaactcacttaattttgttccttcaaaactttctttcccaatcttaaccacattagtaaaatcaaaatgagtaattgcacattctgaaaacaagaaatctggtatctcttgcaactctatatttaaatcaatattttttaaatttgtacaccccataaatgtaccttttcccaacttttgtaccgtctcgggaatatttatacattgtaaattcttggcatacataaatgagtaatctcctatgatttgaataccgcttcccaaatcaattttctccaattcataaatatcgctaaaactttgacttccaatttctataactgtatcaggaattataagttctttcagtcctataactgcattaaaagcaccatctccaatcgagcgaactgtagaagatatctctaattcaccaatatggatttctctatccctataatcaccgtttccaccattaaataaattatttccaattctcgttattccactctctataataaccttatccatattcttgaacataaatggtgatttataataacctgtgccaaagtctgttccatcttccaaataatcccaagtatctccatttcctgagattgtggcaatattatcggaaaaagtcacataaacatcatcgccaatctggattcgttcttctgttttttctgttcctaattgaacactctctgtttctttcatttcatcagcttcaaattcaaaaccactgatatcttcttgaaaaacattttcatcgtgaacaagaccaatattcccctcactacctccatccgagaatattgccgcattcaccggtgctattgtttgtaaactcaaagttaaacacaatatcaccgtagcaatcttctttttcatactaattaaatcctccttgtaaaataagtaaaataatacatactaagtgtacatcttttattgtatttggtcaaacgtttcaagtgtttatggacattcttttttgttttttgaataattttcaacaagtaaattctgctgattagctctaataaatgaatatgaaatacagtatctttataaacaagccaatcttctacatttagcttttgtaccaaattatattgtacctctgcattccaatctgttataattaactaatcattagaaaatcaaatgatttactttacgcaaaggtggtctttatatgataaatatttatataacaaacgcattcagcaaaaacaacagcggaggaaataaagccggaatcgttctggatagttcctcgctgaccagagccagaaagttggatatcgcaaaagaattaggattttcagagactgcctttttatcaggatcaaaggctgcagactttaaattagaatatttcactcccacagaagaggttcccttatgcggacatgccacaatcgctgcctttgttaccatggatcaattacacatgctggatcgttcaagttataccattgaaacaaaatcagggattctaaaaatagaaatagaagaaaatggaagtgtttttatggaacaaaggaatcccgctttttatcagattctggataagactgctctggaagattgcttagacacagcttttattgacggccattttcctatccaagttgtatctacaggactaaaagatatcctggtgccaatcgacagcccagagcatttaaatgaattagttgttaattttgatgccatttccaaactgtcccaaaatcaacacgtagttggaattcacgccttttcctttgtgaattccaatggtaccacagccatatgcaggaattttgcacccctctacggaatccaggaagaatctgccacaggaacctccaactgcgctttggcctgctatctgttccagcagggatacagacaaaagcagtacatttttgaacagggatataatctgggagcagcttctgagcttattgtgaaaatagagtgtaaaaagaacaccatcagtcaggtatccgtgggaggccggggttatctgtccggacaatgccaactctccctagatacacatcgtatcaaaaataagtatatgttgctgataccgaaagatacagaaaagccagcagaccggccatttaagaaaacaaaagtgcccaatcacaggaggaaccccaatgaatgaacacaagattatgatcgttgatgatgagcctgatattttagatttacttgaaaaaaccttagtaattgaaggtttccacaacatcattaaagttgataatggaaaccgagctgtaaatacctgcaaaggagcaaatccagatattatcattttggatgtgatgttgccggatattgatgggtatgaggtgtgcaaacaaatcagacagttttctcattgcccaatcctgtttctgtcttcgaaaaatgatgaagtggacaaaattcttggcttagctgtaggcggtgacgattatgtaacaaagccctttagccccaaagaagtcgctttccgagtgaaagcacaactacgccgagcagaatatcagcaaagcccatcgcaatctcatacaattactataggaaagctgctcattgatccagacggttgccgcgcttcaaaaggcggtaaggatatggagctgactgccaaggaatttgaaatcctgcatttgatggctcagaacattgggcgtgtgataagccgggagcgcctatacgaatccatctggaaggaggatagttttgggtgcgataacacgatcatggtgcatatccgacacctgcgcgaaaagttggaggataatcccacaaggccgcagtacattatcacaatgaaaggtttaggctataagctagtgaatcctgatgaaaaatagacgaaaaagaaatccgcttgtaagaattgttgttttactcgttgcattagtattgatcggagctgcttcgggaattggattgttttattatgctttttccatacctgaaccggaagggttaagtctggcagcatggcctaaccgctttactgaaaatttttcaacatggatagataatgaggatggttcgattacaatagaggacataggattagaaaggctggacgaatatgggctttggcttcaagtcgttgatgaatccggacaggaagttttttctcataacaagccctcagattatccttccaactactcagcctctgaattggtggaactggcggcaagcggatatgaaaacgggaatacagtttttgtaagcacttataaagattccggccatacatggaactactttatcggtttcccttatgccattgggaaatatatgctctattataacggtgaaacagtgagccgtctttctccgatgtttcggatggtgatatttttcataatctttgtgggtatttcgctatttcttatttatggtttttggctcacacgccaaatggggaaaatatcaagagggattggcgctgtttcactccgcacctatcagaagctcccggaaaaaggtatattcaacggtatttatgcgacactcaatcaaatggatgcagaaatttgtcaaagcgatcaactaaagaaggaaacagagcgttcgcgtcaggaatggattgccaatattactcatgacttaaaaacaccactctctcctataaagggatatgcggagctgcttgcccacgggactgcaagcgattgccagacggtgcaggaatttggctcgataattttgaaaaatgtcgatcatgtagaaaagctgataaatgatctaaagctgacctatcaactggaatcaggggcattgccctttcatcccaaacaggtgcgattggtgcgctatttaaaagaattggtgatagatattgcaaacgacccggcattttccgatcgaaacatagagtttgaatgtgatctcccagagattgcggccaccattgaccctgatttgtttcatcgggtggtgtgtaatcttgttttcaacgcactcgttcataatccgctggacacaacggtaactgtatctgtttcggaagataataaaaagggtatctatctttccgtctgtgataatggcgtaggcatcagcgaggaggaacaggccgaactgttcaccagatattatcgaggaacaaacacagaagaaaaaccggaaggcagcggcttaggacttgcgattgcaaggcaaattgttgttctgcatggcggcgatattgctgtcaagagcgaactcggaaagggtacagagtttttaatcctgctccctgcaaattaaggttaaattaagatataaaaaagtctgacctaagatgggggatctatgatataagcatagatcacctctttttatttggtctaatatttggtctaaaatcagaatgaacaggaggctttgtatggaacttcaattacagcatttgcgcaagcaatacggaacaaagtgcgctgtcgataatataagtatccatttagaacccggcgtatatggcctgcttggtgcaaacggagcaggaaaaaccactttaatgcggatgctctgcggtgtgttgaaaccaacatccggcagcatccgcttggatggaaagacaatgcaggagctgggggaacgctactacactcatttgggctatatgccacaagacttcggattctatcccgactttacagcacgggagtttatgctctacatggcagcggtaaaaggcttggacaaaaatcacgccaaagcccggacggaggaactgctggaattggtgaatctgcgtgatgtggcacacaagaaggttaagtcctattccggcggtatgaaacagcgtttggggattgcacaagcgaaactgaacgatcccgacattctgattctggatgagccaaccgctgggcttgacccgaaagagcgtgtccgcttccggaatatcatttccgacttcgccaaagataagattgtgattctgtccacccacatcgtttcggatgtttcgtatattgcggatattatcttgatgatgaaacaaggtaaaatattgctccagggctccatggaaaacgtcacgaacagtattcaaggcaaagtgtgggaggtaatagttgatgagcacaaagctgcgtggtacagccgcaaccttcgcgttgtcaacctgcaccacgaagggaatttggttcgtttgcggattgtagatgatgcgctgcctgcgccagatgccagtatcgtggaacccagtctggaagatctgttcctgtatcatttcagcgaagatgtgcagggcgaaaggagtgatgatgatgaaaaccttggttaagtacgaatttctgaaggtcctgcgaaagaagtccaccttgattgcaatagcggtaagcctgctcgtaaccgctgttttctttggcctgccgatcacacaatttcagatttataaccaggatggcgtccttcggggactggaaggtattgcatacgaaaaagaacagtatgcagacatctctgtccccttaacgaatgaatatgttactgaaaccatccgggaaatgcagaagctttttgaaacccccgataatataggctatgacggaaatgagcagtttttaattgatggcgcatactggaacgggattgctccacgggaaaatctgttgggattgatcgcaagaaactatgcggcccctaatgtgagtgttgggtacaatgcactcactgatttagatgtttcagatggaacagacttctatcaagcacggcagtacaaaatcgaaacgatactgagcgacccttcaaatgggttatcagaagcagaaaaagactactggcggaatatgaacagtgaagtggaagaacccttccaatatggctacttcggtggatgggaagtaattatttcttcctttgaactattaatgtttgggattttggccatctgtatcgtgatcgcacctgttttttccactgaatatcaggctggcacagatgcagtcattttgtctggtaagtatggaaagaccaagttgaccacggcaaaaattgttgctgcgctcttatttggagtgttagcatttacccttcatattctcatcgcatttagtatcccacttttggcatttggaattgatggctggaatcttcctttacagatcaacggtactaccgttccttatccgctttcattcctagaaggtacacttatcaatttgggggtaatttatttagttctaatcgccatgatcggcttaaccctttttttgtcagccagaatgaaaagtccctactttgtactaatcgttgttgttcccgtgctttttattcccatgttcctttctacgaatagcaccaccggaatctataatttgttagtacttttgacaccgtatcaatcactggttcctcgtttcaactcgtacctttcctatcagttcggttctgtgatcctggatgcttttgccatgaaggcatttgtgtatacgatactgacattgattttacttcctcttgccaggattggctttaagaaacatcaggtggcataagaaggctcttttattacccgattgtatatgaaataaaacaccactttacaactttttcacaaaaaaatgccgtacagagcactttggtgtataataagtttgccaacaaaatatacgaaggaaagtgaccctgtacgacaaacttattatacaacgaaaagaacctgattggtagacttcatcaatatttttttatttattttgaaactttttctgcaccgaccgccgagactctgttcctgctggttttatccatcctggctatggaatccgctcattccatccggttcctttaccggcattttttatcaggcataacacaaaaatcccttaacgctttttactacgcctgttcctatgctaaagtggattattcccgcttcatgaatgtgaccgcatccatcgctttaaagctggtccctgactccttgaagctgcagcccgtgttcctgtgtattgacgacaccatggtctccaagttcggtaaaaaattcgaggatgtgtcgaagctttttgaccatgcagctcataacggctctaattacctgaatgggcactgctttgtcagccttatgctctgcatccctgtatggaagaacagcaggatcgtctaccttgctgtcccccttggctaccgtatgtggcagaaaaatgagaccaagctggagcttgctgcgtctatggtgcgtcagactatgcccaccttttcagggaagaggaatgtcatcctcctgtgtgacagctggtatgccaagaaaaatctcacatgcgttgtggatgaatatccggatctggacctcatctgtaatgcacggtatgactctgtcatttacgacctggcgccgcagcggaccggcaaaaggggccgtcctgccaagcatgggaaacgtctttcactgaaagaggatttctgtctgtccgacgaaaagattggggattattacacaggtgtacgccgtgtcctcacaaatatttttagtggaagggaagtccttgcctatgtcacatccacagagaaagagggcggttccagacgcctatttttcagtaccatttttccggagcagatgcagattttctgtgcatggcaggagaaggcacctttaaaccagacagggggcggctggatgaaatacatccccttgttctgttatggtttccgctggaacatagaaattagctactatgagcagaaaacattctggtcattatgcagctatatggtgcggagtcataaagggatcgaaatgctggtcaacctgatcaacatcacttacagcgccatgaagatactgccttatcaggatgaggcattttcaaaataccgtgaagaaagcgtgcaggaattccgtttttttctaagtgaacagatccggcagcaggtattttttgctactttcgtgcaaaataccgtaaccagcataaaatccaaaggtattataaaggctttgaaacagctggttcaggaacaatgctggcatttgtaaaacttgtaaagtggtgtgaaataaaacttaataaccagtaaatatcgaatcatctgcactcagcaaagcttggaacaagtggtgtggatactgccatttactcagcggtattgaagtctaaatgccccttatgctgacattttttatgccgatatttccgacatttaccgccgcccaatgctgtcttcctgcggtaaatgtcggcattaagtatttcaacccgctaagctttttaagcccctaaaggtcttatctcgctacactgaatttctttgaaatcccaattttcatattacacaattttatttccagatagaattatggagtgcaattttcacaagacatacaggatcacctatttttatgctttacagcaactccacatcaacctcacagttaacccattccttgtaagtaaccaccggtagatttcctacagcattttcacacttccccttcaaacttcatccaactgaggttttcataaccacactccccagtcaccataggtaaattttccgcttccatgatgaagtttcccgtctgctttaagcttctcaaacgcatctcgcatacgaatcaaaatttctgaatgtatgtccagtgaatgatgtgctggaaatactttttttacggaaaatgctgaaatctttcttagaggttttatcacctcctggatttccaatttgtatcttcctttaccaaagaaaaggaaccagtctgtattttgttttattcatatattcaagatatccattcagaccttcctttagcattctatcttccaatgctgtccgcacgatgataataattgttgttaaggccatgcacacccaaacactgacatatggaaaaatcatgctaaccccaacgcagtttatgatcagtgcactatatgtaggatgccgcacaatacgatagggtccagtagtacatactgtttgatttctgtccctttgtattcttgcagtggattccaaaaaggtgttttctaaagttgcctttgtagaaaaccacgccgcaaaaagagtcagcagaataccaaaaagccaccaaaaatctatatgttccccttgttcagcccgaccagcaaaaaaatatacaccaaaataattcacgatccaaaatacaaacaaaagtatcttatcccatattggcgaatttgtatctgtttttcctctctccgctaatgttttctcattggccttaaacaataaccagccaattacaagagtaatcatgaaaagataggcaaaatataaagttcctgcataagtcatggtaaatcccgtaccaatagcatataataaaaaccctgtcgctttctgaactccaacccgcataagatataaaaatgcccgcattttcacctggatcacctcgcttgtagattcaatttataggaacattataccgtattcatatgccatttacaatttgactttgcggaatgttttcttaccatccgtgacacttttcttgtaaaggacatgcagattcacataacagtgataaaaccaggctacagaaagaactacagaaatgaaataaattatttcagcacataatcccaaaagcttcacgaaatgtgtaaaactcttcatcataaatattgttataaaatgcaaagaggaatataataaaaagaaatcctgtacagtgatttaagagaaatacacctaggaggagacggatgatcgcaatattagcggaacgaattaaggatgccaacctgaccaataagcaaaaactgatcgcagaatattttctaaaatatccggagaaaatcggaaatatgtcatcaaaagaagtggcggccgcagtgggcgtcagcgatgcatcaatcatccgtttttccagagagattggatacaaaggctttgtggatctaaagaatgacatttaccatgccttggcaggtgagacaagtgcggctgtgcgaaatatgcagcttactgaccggtttgataccgttacaaagaaatacagagatgaaaatatccctgaggtcttcctggaaactatggtctataatgtgacccgttccttccagcagaaccctttggagcattatgagcgcacagtggagctcatacgcaatgcaaaaaaagtatatatcatgggcatgagaggctgtatcggcattgccacccagttcgccagaaacctgggctttatggttgatgacgtcatactccttcccatgaatgaggccgaagcagtaggccggctgcaggacattaaagagcaagacgtcttccttatgtttgaatttgccagatattacaaagtagacatgctgctgatcgaattggctaaatcccatcatgccaaaatctgcgtcatcgcagacagcgccctggcacctgcggttaaatacgcagatgtatcgatttttgcagaatcctcacatctgagctttttcaattcagcatcagggatcaccattgtcgcagaatatctgctcacgcttttatcaagaaagaataaagagctctacagaaaaaaagcccaggaacgagaccgatataccgaggagctgcgtttgtgaattatgcctaaaattatgtagtgccaaagaaaagacagactatcccatcatagactgtcttttttttatataacaaaaactctcccggagaatacacacaaggtgaaaaatcagccaacagaagaaaaaaatcagtaaaaccatacaatatcccccttgtaaaactaggaaaaatcacggaaactctctttgtagtattcactactttttatcaactatgttatagttttcacaacaaataatgattgacgcaaaaaatattatgaattatactgaacccataagatgaaatgagcactacaataattctagataaaaaagtgtgcacttccaaaggaggatattatgctgatctttttaaatgaatacatccatccagacgcactggcgcgtctgaaggaaaaagccgaggttacccataactgggaccgcatagaagaaatagacggaatcatcctgcgtatcacccaggtgaaccggaatatcctggacagagctaaaagccttaaagtgattggcaagcatggtgtgggatgcaacaccattgatctggaatatgccaaagagaagggcattccagtgatcaatacccctactgcaaataccaattccgtggccgaattgatcgtggccctgatgctggaagtgtgccggaaggtatcctattgtgatgccaagagcaggcacgaaggcttccgccagattgccccgccggaaacgacaggcattgaattgacaaacaagaccattgggttggtgggaatgggaaatattgcaagaagggccggagaaatattagcaagtggtttctcagccagattaatcggatatgacccttattgtgacagcgcacaggcaaatgcatatggcatagaaaaattccaggatttaaacgaactgttggaacaggcagacctaataaatatcagtgttccattgacagaatccaccaaaaatatgatatctgccaaaaaccttgcccactgtaagaaaaatgccattctcatcaatgcggcaagaggcggtatcgtaaatgaagacgatttatatgatgcattaaagaataaagtcattcgcggagcggcctgtgacgctttcgtccaggaaccgccaacaaaagcaaacaaactaatggagctggacaacttctgtgccactcctcatattggtgccaatacagaagaagccctgtaccgcatgggcatggaaatcgtggatgaggtcatccatgtaattgaaggtaggaaacccaaacacagagttgtataatggaggaagaaaagatgaaaacaggatgtatgatcataaaagattttaaaaggccagacacacaagtggtggaaccatttgctcaagtggcagtagcaaatctggacgactgcatgaaccgtatttccgcagtccacgaggatatccgccccataaataaaagcaggctgctgggaaccgcttttaccgtaaaggttccccagggagataatctcatgtttcacattgccatggacctggccaaaccaggagatgtgattgtcattgatgctggcggggatacaagaagatccatctttggcgagctgatggtcacctactgccgcatgaggggcatcaagggaatcgtggtagacggttccatccgggatgtggacgccatatcgaaaatggaggattttgctgtctatgcaagaggcatcactccagacggaccttacaaaaacggacctggagaaattaatactcccattgtgtgcggcggcagaaccgtatatccaggagatattgtcctgggagacgaggacggagtgatttttgtaaggcccgctgaagcagaggagctgttggaaaaagtacataaaatccatgaaaatgagcggaagatcctcgatacaatggaaaaggaaggctcctatatccgcccatgggtaaatgaaaagttaaaagcccttggagtggaatataaggaatatgcccagtactaaagaatttcaagctaacacaaagatagaagctctataaagaaacgaaaataagaagaaagattggatagggtaaattatgtttacaacagcagtaaatgatttaatgctattatttttatttttgctggcaggagtcatcctgcgtcaggtgatcaagccccttcggaaattatatctcccatcgggattgatcggaggcgcccttgcccttctgatggggccccagatgttagggttatttcaaatacctgagacctggtccggcatggcctcacccatgatcaatatcgtgctcaccaccactctatttgggattgccatcagcaaggcaaaaatgaagtcctttgccggagccatcagcagtaatatgctgtcctatttctctcagctccttgtaggaattctggtgggtgtgggactgcagaaaatctggaccggactgccaaaaagctggggagttatgaccgtatttacctactggggaggccacggggcagccacctcctccgggactctgtttgaagaactgggggtagaagggatgctcagtattggcctgatcctggccaccttagggttgatcgtagctatggtcaccggcatgttctgggtcaacgtaggcgtgcgcagaggctgggcggcggcgttaacctccagcacgtccggagaggagagaaaaaatgattacattcctctgaaagagcaaaaatccctgggacgggcaacggttgcctctgattccatcaatggcttcgccttacagatgtgttttgtatttctaagcatgtggatcggaagtgtgatcttcggcgccatcgccaaggtgatcccggcagcccagaacattccgtccttgttatatggtattgtaggtgcgattcttgtatggatttttctcacaaagactaagctggataaatatgcggacaaggccgctgtagacaacatcggcggcgttgccttggaaatctgtatctgttctgccactgccacattgaatttatcattttttgccacgtacctggcgcccattctgatccatatggtcatcgtgatcgcattgatgtctgtcttgtgcatgctctttatgcgcaggtggttcggcaaggactggttcccactggcactgatgctttacggtgcaggctgtggttctaccccaagcggactggcattggcacgctgtgtggatccggaagtaaaaacagagagctgggaagcattcggtgtggcacagggctgcttcgttccgttcacctccgtatttgtggctgtctggccagtgatcgcagttaaaaatctatggatcctggtggggatcggagccctagttaccattgtagcatttacctttaatgagcttatcgtgaaaaagcaaaataacaactagcctcacaagaactacacacaccagaagataagatgctccctattaagcagcaggtactgtatacctggccgcttaatagggagcatttttcgtctctaagtcttcctaaattcctgttcttacttttttcatttttccagaagcatcaaattccacatcccccaaacacacctcccgatggtatcccttcccctggggatactttttcaaaggagtggcaaagcggtgataggcgatcttatagttgtcttccccgggaagcttcaggatggaatgatggcctgtcccaaggctttccccgtctttttccaaaattgttttctggaactgaatgggtccgtacagggactgtgccgttccgtaattcacgtgataatcctcacttcctgtatcctcacaggaccaggtaaaatgataaatttcccctcgctttaacaccgtgatcccttcccggaaatcataggcgccttctatatttgccagagtatcctcctgtatccccagcatatcttctcttaatttcccaatagccggctgaccgttcccaaagagaagatacacctcctctccctccacgtacacagagggatctatggtctgatccatggcaatcccatgttctttcatcatctccatggtcaccataggctctgcctgggctgtaaaaggaccggtggggctgtctgccactgctgcgccgatgcaggagacaccttccttattttttccacagaagtataaatagtatcgattatttcttcgtatcacgcaaggggcccaggcatatccaattgcccatggaacctgttccgtggccagatccagaatctgcccttggtttttgaaatgctccccgtcaatggaagaaaacacagaaaatgtacttcctgaccatccgtcaaacccatcggtagtaggatacagataatacctgccgtcaaaccacaccagatccggatctgcatataagccctccagcacaggatttctgtccccaaaggcttcccacagtcttgtatattcttcatcctccagcttcaatacaccgccgtggcgttttgtattacagcccatatcaaattccctgtcttccagaagataaaaccggccgttttccagatcctgggaaagaatgggaagatagccctttttttctttaaaccgatccaccaggaggcaccaggtttttctgtcaggcaaaagaaagcattccggtccttccacaccctccaggtgctccagaacctcactgcccacccgttcaaactccccatccaaggtctctcccctttccattacaattctgctgtctgtctcatctttggaaaagcgataataagcactgccagaatgaatgatcgttgtgtcaatcacatgagactctctctgtatatacaccacaggttgtgaaaagctgcaaaaatcctctgtgtaagttccataaatcctctgttttggcctttcttctcctggaagctgtaccatggacgcaaagaaaaggaaaaatttttccttttcttcgtcataaaccgcctcgggagcccacacacagccagcgccctttacgcccaccctgcatgaccttgcctttgaccaggtgacgagatcctttgattcccacagaaggatgtccctgctgccgctgtattgggctgcctcccagccctttcctgccccaatgcgaagatcggttgcaaggaggtagaatttcctctgctttgaatcccttaccaagaaaggatctctcacccccttttctccaatcaaagagcgcagcacaggttttccctgattcaggtccttccagaaccgtccgtccctgctaagtgaaaaatagatctgctctccatcctcatgctctcctgtaaaatgcacaaataaatatcctgccatggtcttatccctccgtacttttgggaaacgccgtgttttcgccgcccattttcataaaaaatgacacttccaaatctgttcctgcaaaaatttgatactcctcttctacgtctgctccccaactgtctattccgcccacgccacgcatagcgccatatacactaaggatcgtccgccctccagatgccagctcttctttgtgatcggcacactccagctcatgggcggttaccggaagcgccgaaaaagcaaagggactctcatcataaacaaagcttaaaacacccccgtcctttttcacgcccatggcgtaggtatccacatggcagccattttcctggggcacaagatactctgccacagttatgccgctttcatgaacaccaaattttcctcccttctttctgtccggataggtttccccggacaggcccagccagccgaccccttctgcttcccagggcagcacaaatcgaagcccaaagcatgggagctgaggcaaggagctgtttccctgcatactggccttcacataaatggtccccgccccatctaccctataggtgattttcccatggctggtgggtatggttggtatttcaaaagaatagcacagggttactgcatcttcctcacataccacctgatagtccacgcacctttgatatctgtctgctcccatccacacagcactgtccgtgggaaatccgttccctctgtcattttctgtggcagctctccacagagcaaatctgggcgcccggtatagccattcctttccttcatataccatggagataggtccagcttccgtataagaaaaaaggatctcaaaccccctgccctttatcccaaggttcacatctcccttggtcacagttaaatgaccggcgttcttctgtgcctccactgtccactgtttcttcacatcccggatctgctcttgtgccacatgcatcctttccattttctcctgctggtgtttttggcggattttcgcaggctgataccaataagcagcttcctgcatggctggttttgccttacgatcagcaaacacaaggccatttgcacagaaggcataatcggtaggtctgtccagaaaatcgccgccataggccagatagcgttttccgtctgtatgggtgagatacagggcctgatcgatgtaatcccaaaggaagccgccctgatacatgggaaattcatccagaagcttcatatagctttccatgccccctaatgaatttcccatattgtgcatgtattcacatagaagaaagggtttttgcggctcattttccaggtaggcccgtatctcctttggctttgcgtacatccggctttccacatcagatatccggtcaaatttccggttccaaaatacgccctcataatgaacgattcttgacggatcctttttatgaaaatactcactcatggcaaggatgtcttctcctgcataggattcgtttccgcaggaccaaaaaaggatgctggcatgatttttatctctctccagcatggatgccgcccggtctaaaacacattccttccactggggcagatctcccggcacattccaagagggctcgcatttttgcattttctgccaagaaccatgactttccaggttcgcttcatccatgacatagattcctgcttggtcacaaagctcataccacctgctttggttgggataatggcacgtgcgcaccccattgatgttattttctttgaatatttttatatccgcacgcatatcctctaaggtaatgctccgccctctttcagggttccactcatgacggttcacgccatgaatgatcagtctctttccatttaaccgcatgaccttatctttgatctcgaatcttcggaatccgattccataggggaccacttccataagctgtccccgggcatccgccagcataagctctgcctgatataaatatggctgttcatgactccagggctgtacctggggaagggtgatctcaccagaagtaaaatagccgtcttctgtgaattccatatctaagaaagcctcatagatctgtgtgccgtcccggtcttttagcctaagcttggtggtacagccgtccagtgcctgtaaatacacggtgtcctttccttcctgagctgacagcttcaattttacagtgagtataccggtcctataatcctccttcaggccgcagcacagccagatatcctccatatgtagttggggctttgcatataaatagacctcccggaagattcctgagaaccggaaaaaatcctgatcctccagccaagctccgctgcttcttttgtaaacctccacacagagccggttccccttttcccggatggcctttgtaagatcaaagtctgagggtgtaaaggaatcctccccatatcctataaagctgccattgagccagacatacattgcctgctccacaccctgaaaggaaatacagatccgttttcccaccagctgtgtatccaggtcaaattcctttacatagctgcccacaggattctgttcccattctatatggggcgggcgaagctccttgtgcccatcccaggggtacatggtattcacatattggatctgcccataaccctgcagctccatatgtcccggcacctgaatacttccaaaatcctgcagatcagcatccatcttataaaaatcactttttcgctgctctggacattggctccaggcaaacagccactcaccattcaaagactgacgcagggtttctaagccttcctggcagtccttctctgtctcgtagaaatgatggtctgaatgtggcgctaaacgatttacctgaaagatctctggattttccaaccattctaaattcgcagtcatgttttcctccatctattaacaaagcgggcaagcccgcttcaacttcactttccctctctttcaagggacttgacagctaagggcccggtttcccggacccttgcgccaaactatccgcccttttctaggcgcacttaccccttaaccgctccgctggtaattcctgcgatgatgtgtttttgcataagcagatagaaaataacaatggggatcagcacgatcaccatggtacaaagcattacggtccagttattggaaaactgtcccacacctttatacacttccatgatcagcgtaaaattctctgaagagctgataaacaaatagggcatcataaagtcattccagatccacataacatcaaaaataacgatggtggttgtcactggctttaacaggggaaatacaattttccaatacattttccaaagtcccgctccgtccatcaatgccgcttcctccagctccttgggaacccctccgataaagccctggtacataaataatgcaaaattacaccagctggaatacaaaacgatcatgcccagcacggaattctgaagattgaattttgacatcaggttaaacagcgggatcaatgtggtctgtgccggcaccataaatcccaccagaaaataaaagaacaaaaactttgtcagtttattcttatgtcttgtaatggcatatgccgccatggagccaatgactatgatgatcaagacagatactaccgtgatcacaagggaattgcggaagctgccccagaaattgatcacatcaaaggcttccttgtatagatccaaagtaaaattttttataggaaaggacaagggagatactgtggcatctctggcaggcttaaacgtgttaacaagcagataataaaatggaataaaaaataccacacagacagccagcatcagtccttcacccaggaagctcttccaattacgcttcttatccaccatttactccacctccctcttcttcatcagcttcaattgtataatactgatcacggagataaacacgaagaatacagctgacatggcagttgcctttccatatgctttttccacgaatcctgttttaatgatcatctgtgataccatggtggttgacgttccaggtcctccgcttgttaaggcaaagggcagatcgtacagcttcatggaattcaaaagcaggagcatcacacttgtggtcattgcagacgctaacatggggaaggtaatatatcggaatttctgccatgcagaagctccgtccacggttgccgcctcataatactccgcaggtatactctgtaattgggccaggtaaatacaggcatgccagcccactgcgctccatagattgaccatcaccacggaaaacattgcccatttgggatgagccagccacatcaccggcttgattccaaacaatcccaatgcctgatttaacaatccgtttcttgtgggcgccagaatataggcccataaataaccaagaatgatcgcacttggcacagaagggaagaagaataccgccctctgcagattctttgttttcatgcgggaattcagcgccagggccaggggaatcgcaagaatggttgttaacgtgggaaaaataagactgtacacacaggtattgatcaacgcacttttcattccccggtctgaaaatactgctttaaaattctccagtccaataaagcttagatccttaatggcatagccgtcccagtctgttaaagacaaacccaaggtctgaaccagaggaatcacggtaagaaccgtatagacaagaaatgccggaagaataaatgccagatagggtatttctttccttaattttaccttcataggtttcctccctctattttagaaaaggaacgctgttcacgtcccttttcttctatttatttgcttaattccgcctgcttttcatccatacgcacgggaatattttcaatggtatccgcaccggtgatggcatcctggattccggtgagaacctctttgtagattcccgcagaatttttccatacaatctgaggaagatagaaattgccgtttactgcatcttcttttactttttcaaacactgtgcccatctcatattcgataccgtccacaataattgcgttattgctgatcttctgccatttcagaatgttctcatcccttgacataaactcaataaaggttctgcatgcttccttatgctcagagctggtgctgatggacaagcctacattcagtgcacctggataaacactgtttccatccttatctgcgatggcaaaaaggtcataattcaaatctggatttttctgtgcgatggtatttactgtccatggacctccgtgtatcatagccacttcaccgttggcaaacatatcgatcacctggtcagaatttaatccaagagccatagggctgtacaagccggattcaatcatatcctggtaccagattttatagggctctgtgtatttttctttgtatgtactgtctccattgttgatggcaagatccgcatccggctcctgactgatcaccatactctgatataaatcctgggacaggttatgaacattctccgcatcgtccagataaggctctatgccaagctcctgaagcttgccgcaggcatccacgaattcatcccaggtctttggcacctctttgatgcctgcctcttcaaacagatccacattgtagaacactcctgccagccatgcatccggagaataggcgtagatctctccttcatttccatatgtggcggctgtctccccattgatcctgccaaaaatctccatatcgctgatatcctctgccagcttccgctcaatgatctcctgtttgttctctgctgcagtataaaacatatcggtcatctgtccggaagccaccagtacactaaatttatcaacatactgctgcaccggcggaacatactgaagatcgatcttgatctccggatattcctcctcaaaggcttgaataaactctcccagctgctcctctgaataccaggacaaaaggctgacggtctccttctccttggccgcctccactcctgccgttggtaccaggaccgcccctgctattgtaactgcaagtactcttttcaactttccttttctcatccttcatttactcctttcacgtttttgataatctaattgtaaggcaggccacccataaaatgaatgaatattactcctgtacttttgcaaataaaacccctgagttcttcaggggttttgctcattttacttatgatttgctgttttttacactcttgcggaagttcttgggtgactgccctgtatattctttaaactttctggagaaatggtactcactttcatatcccacgccgtgggcaatagtccccaccatctcatcagtcattatgagaagctcttttgccttttccatacgcagctttgtcacatattcccaaaatccggttccggtgagctctttatactggcttgtaaagtaattcttactcatgcctatatgatccgccaccttctgcacggaaaagtcaacgtcctggtaagaaatgtccgtaaaggcattggcccgcagcacaagcttcttctcggaaaaacctaaaaaggtgttcatgtccgcaaacgtactggccaccttttccttgacgaatacttgaagctgaccggcattttgcatattgtgaatactttccatgcgcacgtttctcataagagaaaaggattcctgctgatctaatttttttaaaataaatttgatccttaccaggcagtccaaggaaatgtcctttaatatctgcggatttatctttttttcggctgctttttggaaaatccggtctaataattccagcagctcttggcaggagccatcggcaattgcctttgccgtcaggtgctccaaggacggaagccggatatcctcttcggaaaaaggagactcctccagcttataggtcccgctttttagctcataaaaaccatagttttcaattccaataaacttcttcagccattcccccagggtgcctctcttgctctcatacagatacacctgacagagataccctgccgcagccgccgctgtctgaaaagcttccacaaattcctccatgggttctttcttcttccataaaagaacggaatatccagagtcggggctatattctatggctgaatattttaggagcgtttcacttttcaacaactcttccaatagattccttctctggccatcagaaagacagctgccatttccatccgttattagaagtccgcagcagttcatctcttgaagggacctttccatctcttcctcacagcttctctccccccggacgatctgttccaggtatcgaatctgctgctttcctatggttgacttttctgacaccacagtttcattgtctaaagcggttttcatcttatccaccaattgattcagcatcagacgggatactggctttaacagaaaatcctgtactccatattgaatggccttttgggcataggagaaatccccataggcactcacaataacgatcctgaccttttcatcctcttttcgaatatgccggatacactccaggccatccatcaatggaagctggatatccataaaaataagatctggcttcgtctcatcatatttttccagagcttccaagccatccgccgcagccgcggcaatttcaaagcccttctccttccagctcaccagtttttcaaaaagctggaaattcttggtttcatcatccacgatcattaccttgtacatgtatccctatccttcttttcttattctcagggtaaccttggtatattcgttaacccggctgtgtatgctgattccgtactgtccgccatagaccaggcggattcttgcattggtattcacgataccgatccctccgtcgtgagaagtctcggccagcttctggcggatgccccttaacgcatcctctgatattccgcatccgttgtcccatacctcaaagatcagatcctccttcgtctcttgaatgctgatcttaatcacgcccccgctgcgcctgtccttaaaggcatgcttaaaacaattctccaccacaggctgcagaataaatttaatgattttatattctccagttgtctcttctgtgcttatgtcatagacaaacagctggggaaatctttctttgtaaaacattaagtagtttcttatataatcaagctcatcccttacataaaccctgtctctctttctctccatggcataccgcatcatcatactgagggcctgtatcatatcttcaatttcctgattgtcacagagcactgccttggtctggataagctggaacacattatagagaaaatggggattgatctgattcaccagggcttccagctcggcgtccttttgtcttaactcagctacatacacatcattgatcagggcattcaccttttttgccatatgctcaaatcgctctccaatgatggacagctcccggggtgcgtcctcatatttttcagggatctccacctctgttccatcataggaattgatccggttgatcaatgcatgaaatggtttttccatgatgcggatattataaagattgatccccaccaaaaacacaacggtgagacaggccagacaggcaaccacaaagaacaattgcttaatgggctgccagagaaccccctcgtcactttcaagaatgatcgtccacccattggcctttaaccgatagctgatataaatacttccattttcttcatcaaatctgctctcccctggctgaacctggctcagaaccggaccaagggctgatacggattggctgtctttttcaccatagataatttcgtttctttcatccagcagcacgtatcttgaatccttttcattgcctatctccagaaaatctgcgattccaaaaaggctacattcaataatctcatatcccaacagtctgctggagtgatggatgggatagatcaggctgaaggtgtcgttcctattggaataatacaggtggtccttcccgtggggcggcgcatattttatcacctccggcttctcaagggcctccttaaaccaatcctgttctccatacccataatcggaacgcaggacatttctcaggctgtatttcgtttcacagtcagcattgatcagattgatatccacaatgtattcagtaaataaatttacattttgcagatagctgtcaaggtttcttttattttccatccactttgcagaataatcctcataatattcacccagccaggagatggtgggctgatattttgccagggagatggccatttccatcagcccctgcagcctgctctcaagagaatctgccacaatgtccatctgctcctgctgattctccaagatacgctctttcatataactgctgataaaccaggtaaatgataaaaccagaagtaccaggaccaaaacaaatacacaagaaacacgcaggaccgtctgggttacaatggatcttcttttgttcattgatcagttgcatcctttcttctagggtactatgattttttaatttcatcatacattttcccctatcatttgtcaattctcctgcagacgcccaagcccaaatggggcggtattgtaataatgcttcctcttcatgtgatgcaatgctccaaaaacaaaaagagtgtaagcactttaatagcaataggcttacactctttcatattaagaagttcttgtttctacatagtctgccaattccagatattcctcatagcggtcattataaaaacttcttctctggggatttggctcataggtttttattacctttgctgccatatgctttcgggcttcctccatggaagcgtaaataccacttccaacagccgcattaatggcggagcccagggcacaggtctggtcttcgtctacgatctgaatgcatttgtcaaggagatctgccatcatctgcatgacaaatccagattttttagaaataccgcccacggcgatcacattgtcaatgaccactccctgctcttcaaacccagccacaatcctctttaatccagataccgcgccaaataccagcgaccgatacaaaaacggagcttgcatacctagacgcagtccatcaatgatggcgctctgggaatcattggtgttggggtatctgcggccattaaaccaatccagggaaatgggaaatggttcatctggaagctgtcttgcttcattttccagatcgatgagaatgcggtcatccgctttttccaaaatcttatgaaacgcttcttcactgaaatcctctttcattttctgaatgggccagagaagaagtttcttaaaccaggcaaaaatatccccaaaagcagcctgaccggtctctacgccgatcattcccggcaaaatagaatcctcagcctggccgcaatattgcttcaggtcctttcccgccaaattttcaggtttttccacgatcatatccacagcggacgtaccaagagtacatacaatggttcgttcacggattcctgcacctaccgcaccggcatgtgcgtcaaaggaacttcccgaaatgataacggatttatttaatcccagtttctctgcccatttgggagaaatgattcccaccttcgttgccgcatgctgcggtgctcttccatagcgtttgtgaacctgagccaggtaaggatccagttgttccaacagttccactgccggaagtcctccccatgcgctgtgccaatatgccttatgtccggctgcgcatgccccatggaatattttttccgggcaggtctcaccgcacagctcaccaaccatccagtcgctgtgttcttcccaggtgtatgctgcctcacggatttttttatctgtgcgcaccgtatgcaggatctttgcccaataccattcagcgctgtaatctccctgataggcggaataatctgttttgctcccatttttaaataagtgattgatttcttctgcctctgcaaaagcagaatgatccttccagagatggaacatggcattctcgttttctcgaaactcatccagcaatgccagaggaactccatctccattcactggtaccggcgtggagcccgtggtatccaccccaatcccaacaatgcacgctttcttctctgggctaagatcacaaagtgcctgaagaatacaggcttccaaggattccagataatccagcggatgctgacggaaaaccgcctgttccggatgctgataaagccccttcccccatctggaataaaaagaggttcctgttcctatggcttctccgctttgcgcatttaccaccaacgcacgaacagaatcacttccaaaatcaacaccgatcacataattttgtcccatatcttaacctcaaaatcagatattatttgtgggaaatagcctttttcgctttttccataatgttttccggggtaagtccatatgctttcagcagtgtctgcggcggagcagaatgtccaaatgtatcctggacgcccacaaattccacgggcaccttctccgtaccaacaatgacttccgccacagcacttcccaggccgccgatcacattgtgctcttccgcagtgacaatggcaccggtttcttttgccgccttgataaccagctcccgatcaatgggtttgattgtatgcatatcgatcacccgggcatggattccttctgcctccagcagcttctgcgctttcagcgcttcctgaaccatcagaccgcaggcgataatggtcacatcttttccgtcaacaagggtaaccccttttcctatttcgaatttataatctggaaacgtatctgtaacaccatccactgcgggacggccggtcctgaaatagcagggaccattgtattccagcatcgcttttgcagccagacgtgtttcatttccatcacagggaacaattaccgtcatccccggaattgtgcgcataaggctgatatcttccagggcctgatgggtagctccatcttctcccacagtaagacctgcatggcttccgatcacttttacattcagcccgggataggccaccccattgcgtacctgatcatatacacggccagcagcaaaaattgcaaatgtatgtaccaatgccgtagcaccgcaggcggcaaagcctgctgccgtgcccaccatgtttgcttccgcgatcccaagattatagaagcgctccggatatttttcagcaaaatacatggtcatggtacacttcttcaaatctgcgtcaaacacataaatattttcattgccgccgaactcctccagagcacgtccgtaggcaactcttgttgaaactttttcacccattttttcagccctccagttccttaattttagcgtccagttctgcaaagcaggcaggccattcctctggctttggctgtccgccgtggaaatccacattgttttcaaacagggatacgccttttccttttactgtatctgcaacaatcactgttggctttccctttgtttctgcggctttatcaattgcctctgacaaggcctccacatcatggccatctgcttggatcacattccagccaaatgccgcaaacttttcgccaattggatatggagacataatttcttccagtgttccatccagctgaagcttattgttgtccacaaaagcaagcagattgtcaactttgtagtatccagcgctcatggctgcttcccacacctggccttcctcaatctcaccgtctcccataatgcagaaaacccggttgcccagtttgttggattttccatacaaggccattccacatgcaacagaaagtccctgtccaagagagcctgctgacatatctactcccggaacatggatctcaacgtgcccggaaagatcactttcaagcgtacggaaggttttcagatgttccatggggaagtatcctttcaaagccaatgtggcatacatggccggggaacaatggccttttgaaagaacaaatctgtcccggtccggtttttctggatcctcaggattaatattcattttatcaaaataaagaactgctaagatatccgcaatggagaaggagcctccaatgtgtccggatcctgcattctgtatggtgagcagagccgtttttcgaatctgcgctgcatgaagctccagttcttttttctttttactgtccataatcgatctcctcgcttttcccttaatttgcagaattctgctttttctgtttcattctgtccacgtaaactgccacgatgatgataattccctttaatacatactgccagtaagaatttacatgcatcaggttcaggccattggaaatcatgccgatgatcaaaacaccaataagaaggccgcctgtggtaccagttcctccaaagaatgacgtaccaccaagaacggctgccgcaatggcatctgtttcgtatccttcacctgtagagggctgtccggaggcaagacgggatgccagaacaacaccacagaagccggcaagtgtaccgctgatggtccacacaagaattttaattttattaacatcaatgcctgaaaactttgcggaaagttcatttccgccaactgcataaatatgacgtcctgtctttgttttattcaagaagaaataatccatgatcaggaaaatgatcagatataccacaggaagagggatcggtccaagagaaccctggccgattgccgcgaaagcatcatttccataggcagtaaccggtgatccattggcaaccagatatgccgctccacggcaggtagactgcatagccagtgtaacaacgaaaggatggatccctgtataggcgatgatcgttccatttgcaaagccaaccaacgcaccgatcaaaattccaagtaaaaccgccgcccatacaggcataccccagaactggaacgcagaaactgtcataacgcctgtcagcgccgcaagcgcaccgccagtaagatcaatacctgccagaatgatcgccatctgaacaccaattgccagatagcagtttgtggcacatgttcttaaaagatttaataaatttttctgggtgagaaagttattgccgaaaacactaaaaacaatcgtcagaaccagcaggcctaataaaataccccagttctgagaaaaatatccttttaccgctcttccaagaccgcttttcgatttgttattcattattcgttacccccatcgcatacttcaaaatagtttcctggtcatattcctcgtggttcagcgcacctgtaatacggccctctttcatgatgaccatacggtcgctcatattcataacctcaggcatttctgaagagatcagaatcactgcaagcccgttctttgccagatcatttataatggtataaatttctgctttcgcgccaacatcaatacctctggtaggttcatccagaataaggatcttcgggtttgtggcaagccattttgccaaaagtactttctgttgatttccgccggaaagagtggaacaattcacttcagaagaaggagctttaatatgtagtgacttcatcgcgttctgtgcaatttcgtcctgggtatttgtatttactctcaataatttgataaacctgtccaaaacaggcaaggtaatattaaagcggatggtattgttcagcagcagtccttctgactttctgctctccggcaccagagcaattccttgtttctgcatatagatgggggtgttatttgtaatttttctgccctccagataaatctctccggaatccatgggatcaagacccataatccctttcatcagttcagatcttccagctcctacaagtccatagaaaccaaggatctctccggcatgtaccttaaaactgcagtcaaccgcacgttttccacaggttacgccttttgcctccagcatgacttttccccgtttgttaaaggtacgcacataataatttcccagatcacgtcccaccatcatggagatcagttcattatcgctgcatgcagatgactttctcatgcccataaaggcgccgtcacgcataaccgtaaccgcatcacatagctggaaaacctcagccattttatgagtgatgaaaataatacccatcccctgctttttcagatctcttactgtgttaaacaagatctctacctctttttctgaaagagatgaggtgggctcgtcaagaattaatatttttgcatttagagagaaggactttgcgatctctaccatctgctgctggccaagagaaagttttccaacatattcattggggtcaacatcaagtcccacacgttccaaaaatggcctggcagcttccgccattttatctttactgaccattccaagggaatttctcatctcccggcccagaaaaatgttctctgcgatggtcagatacggttccagggcaagctcctgatgaataaaggcaacaccaagggcctgggattcatgaattgaatgaatttggacttttttcccttcgatatagatatcaccggaatctgccgggaatacgccgcccaaaacattcatcaaagtagatttgccagcgccgttttctcccataaaccccataacctctcctgcatggacggttatcccagcatgatccaaagccttaacaccaggaaatgttttcactatattttccattcgtaacagttctttttccatcttttacccctctatacaaaaagttaccagagatttactctccagtaacttttctgtattatttattatacgaaaatttacaggcaaatcgtctagagtaatactactgccaatctgttacgtcaaaatcgccaatattttcgccggtgatcagagtaacgtctacaacctgatcatgttcaacctcttctccatcaagagcggccatagctgcttcaaccgctttttgaccaatcacagatggctgctgggctgcagatgctgttgcggaaccatctgacacatatcccatgaagtctggattgccgtctacaccatagataagaatttcctcttttccggctgccgcacaagcctgaacgcatccaagagcccccatgtcattgatgcagaagaatgcggaaagatcatcatctgctgtgagaacgtcttctgctgctgtcatagttttggcagtatcaccttctgtatctgttgtagaaacgatctcgaaatattcacctgctgtttcaacaaatcctttttcacgctctacgcaagcggttccagatggctgattcataattgcgatcttggacccttctggaagtttttccatcatgtcttttgcacagtcaacacctgctttgtagttatctgaagcgatgatggcagcaactttgtccgttgcatcaactgctgtatccacattaataacaggaacaccggcttcttcacaggcaagaagagcttctgttacagcggtacagtccattggagccaggatgatggcatcaacatcctgtgccagaaggtcgtttacatagttgttcattgttgtctgatcgctgtttgcgtccacagaaacaagctgtttgcctgggtccataccaagctcggtcattttctcctcaataccaccctgcatagcacgccagaatggattgttcattgtggtcggtacccatccgatagtgacttcttcttttgcagcctttgcagagactgttacgctcatgcttcccaccattgctgcagccagtgtaagagctacgatttttttgttcattttgttttctccctttttatttttatttacctcagtcccagcaagctcttattatgcgtccaagctcatgcacggcactgaaatattctatttgaaatgtgaagaataaacgaaacagtctgtcctatggatcattgatcattgtgcagctttgctttacgtatcaaagaaaaaatatctccctgggttaaatgttccagcatatagtagaagcctcccagaaggaaggaatcactgttcaatttggagaaacggatgtaggcacactcttctacatatgcaggcacacaatttcgaatggattctctgacttttttcaggaaatgttctgtgtccggataatcagggccgataatgatgcagtcgggattcactgtatagatgatatttgcgataccataccctaacatccaggccattttttccacagcccatacagccaagggatcattctttttataggcatccaaaacatcctgatagctgctgttttctgtaaggggactatccggaaattcataaagccgttcaagaacgtagcgcattgcactctcacttccggcgcgatattcaaatgtaccggtccgatcctcaggggaacgcttgctgttataatttaatcccgtataccccacttctcctgccagtccaagctgaccgttcataatggccccgtttacaataaatccagttccaataccatatcccctggaacgaatgacggcaaggctgcctctgtcaattccccgaatctcctctgcacatctccattctgcataagcagataactttgcatcatgctttaccagaacttcctgtccaagaacactttccagctcctttcgaatattgatccggctgagttcctcaaattcggaaaccataaaaatttcttcatttttctctggacgattaataaacaacccaggcacggccaggcacacgccaatgatccgatgagccccgaactcctctttgagcaggagggcgtcttttttcatctgttcaacaatctggaaaaagtccttatttttttcgaagcaataacgaatatgtttttcttcatttccatgcagtgtaaaaatactgaactggtaatcctttcgagttatccccacagacatcagataaatcccatccaggcgcaatccgatgttttccccccgcctcccggctgcggtgtccccatccacgccaacaatgtccatttcatagaactcgttaataatattcgtgatagtagccttctgcaggttcagatcagatgccagcttggttcgtgtcatgcttcctttttcaagaagggttttaaagaccaacatcctgttgtttttctgcatctcgctgctgtttattcctcgtttcataagtttctcctccaaacggttatgttaattatctgaactcaatggcaagtcgtgtcgtttgtattaattggataaacttaatttcctcttcacatttttcattttaacacaatttgccccaaagtcaaggataatttctaggaatccttgtacaaaaaagatagtttatgtttgttcattattcacaataataattttgtgtacatttatcaaacacaaattttcctttaaaacaccgtgattcgagtaaattttaacaaattataaaaactattgcaatatagtttaactcaaacttccgttgtactgcgagacaagccgctgattttgggttacttttatacacaacaagggcctgacgtaaaatagagcagaagagttataaactcaactgctctatcacataaaacaaatgttattcttttatgtttgtaaaaattttactcagccgcctgcgctggctcttcttcccctgccacagtgacgataacacgctgtctttcttttcaggcatgataatctattatagaacatcaacaacaattatacaatcgtatatattttcatagttaacttaatcttctttttattcctctattgtaataattactctctggtatctagtaagtgtatgtgtgccatcatcttgaccttcaactatcagatggatcgtatctcctgctttcgcatcctccggtacagcaaatgtcaactccccgtcttctgagccgttcacttccagcggtatgggattctcattctcatccaacgcttcttcatatgaatctgcctgcgcatactgccaccatttaaaggaaacattatctccatctggatcttctgcctgcgcatgaagcacgatactttcgcccgcctttgccaccaagtcaatgccctcctgaacattgaccacaggtgcatggtttgcatcctcatacttatcagcaatacaccagtcggcacgtgccgcaaaatcattctgaagagcttctataaacattcccatactgcattctgactcaattgctgcataataattcgtcacatcaaggtcttccagttcacttttgacaaatctgccaccccagccaccgtatgtttcatcttcctgacttctaagacctgtacggatcagccaagtccaatctgcactatcaccctctgagagaaagtcatagcggctgtaggaaacgtttgcggcctgaccaccaaaccagtcaagagaatccagaagcgcttcattagagccaaactgatctttttcttcctctccttccaaatacgttccatcgccccatgttacatacctgtcaagcaatgccccatggccttcaataatattttctttcataaaatcgctttgcatcttttcgctggccccatccggcagccctacccagtcagagtcccagaaatatccatatgcgaatgccgctcccgctacatctaccagcttaatgtccggccattctaccccaatatacgttgcgtatgcatcatcttgctgcccgaatgcacgaattgttatcttatctgagatttcacgttttatttcatcccaggactcatcctcatcatattcctcctcaattgacttaagcgctcttccaatggtattcataccaccacctgcagtcagataaagtggtctgtcatcttcttttagaatacttgcttttatcagttcagatccctccgtatccagatccatctctgtaggcttcgtcacatttccggttaccgtgatactgcggatatattccggtgtaggataatctgagtgttttgaaagattctcgtatacctcttcataggcgtcaacgaattcatacatccagtccgtaccaggccagcggtacgcttccgttgtttcatccccactgtaatggagttcggagctggaaaaaacaagcccttcaatatcaatatcatctgcatacagcaatgtgtgaatgaaggaattcatatcatccacctctccgtcatgggtaatgatcaatctggccttctccggatcagatgccgccaaagctgttccagctcccacattacctaacgccactgcccccatcaacgaaacagcaaatattttcttccatgatccaaatttcattctacgtttccctccttatatttttaaaagatgtccctattttatcaaactacttttttataaaatataaggatgcttactttaattataagaatacttaccttctcattttccactggtttagctgcctgttcttctcctcaatcaattcatccagaccatacattttcagttccttcagcattctctcacatccctcctggggatcgatcattccgttttccaaaatatatttatagtcatcataaaccttctgcagctctataaaattatcatacacccttgtcatatcaaaacaaaatccaaaatcctccgagcgctttgcctgtgcattgaatttccggatattttcccacaaatctttggaattaccttcccaaatatccgccaaaaataagttgggaaccctccatgcataggctgcatatggatttccttttgtttcatctatataagtcaaaaaaccatccgtcttttttctataatggacgccctctatgccatatgccagcaaattatttatctctttgtttgtaaacagcaggttcatcagcttcatggccccttcttctgatatggtagttgtaggtattgtccactgtacagaaaaaacattatttgcaaacatctttgtttcgcctaagcatacgatgtcaattttctttcctgtcaaaacggtttcctgctgctctactcccggcttaaagttcgtggtatagcacaggagttttcccttttgcatcttctccagaaaactctcctgttctgtcactgaattttccggaaggtatccctttttgtaccacgagcgaatacgctgcaaaaaatccatatactcttttgtctcaaacagattcgtatattcactgctgcctgacagcataacaccaaacggatccccagagattccttcaaaaaggggaagagtatttatcattgtccctacccctgattctacaattaatatatctgggttctgttcatgtatgtatgcaaataccttttctaaatcctgataatcctgtatctcctccgcttctatcccatattgttccaaaatctcactgttaaacgcataagtatcccaccctctggcatactccctgttatttggaacaccgtaaagccttccgcctttcattttgcatgcctctatatattcctcttccacttcactctttattgccgccccatatgtatccaaaagattcgttatctctgtcagcctgctttgcatatagcattcctgaaataacaaattatcggcatacataatatctatctgttcccgttctgagagcacacgattcataacatccgaataattatctgaatctgtgatctttaatttcactgaaatacccagctgttcttttgttatttcagagatccgctgctgaatcagcttgctgtcctgcgtacttcccggatatgcgattacatacgtttcatttttaccatccgtttccaaagcgctgcacatctggtttcccagcgtactgttactacagagcagcaaaacagttatcagtaatcctattattctcattttatttcccccgctttcggaatatggatcactaccaccgctccgccgttttcttcgttataaaattgcgttttcgcttctccatcgtaaagaatttccatccttttacacacattgtagattccaacatgttccccttctctgttgagaataacttcccctttcctgagcttttctagtaccgtttctgaaaaacccttcccgttatccaaaaccttcacctgcatcccccattccagtttttttatactgacgacaatctttagaatactgttgctgtgtatctgatgttttactgaattttccacaaatgtctgcaaaagcataataggaatcttctccattctcgtctcctcctccgcctctactcttaattctatggcatcctcatagcgatacttctgcaacgcaataaacagtttaatatgttctaattcctcttctacagtcacccagttttcggccttcattacatacctcatataatttcccatccatatcattacctgctgagcctctttatatttttccagaaagacaagatttctcagcagattgagacagttgatcaaaaaatgaggattaatctgaagctgtagatactgaatacttacctgctgtctgtgcagcttttcccgataaatctccccattcagccactcaatgcgctttatcatctcttccaacgtctcatatgccttcataaattcttcatattcatctccccttttccattccccgctctgcagaatttccagattattcataacagccacaaaccgatcaagaggctttagaaaacgttgacgaaagccataaaatatagcgtaaatcgcagccagcagaatcattatactcacagtggcaatataaaaatattctcttgtccatctaatctgcttcttttctgcagctaccgttattaaaaacggtcccatttcagttttattctgcacaagtacgtattctctctcattccagccattggcttctgtccatacttcactgtcacccagcaaatcatatggtctgccacccaactcacaaacatagctctttccatatgtatccagctctgcacagtctagcatacggtcagactttaccacactgcctacatatgtcccataattcttcataatcttcaaaaaaaggcaggaatcaccccgcaaaacaggctcccactccctgctgatctccttcttttgggcagctaattcctgcaatttggcatgaatcaaagcaacatcctccgtgttcgtatcactctgaaatgcgcttacaaaaatattgtcttccggattaaaaaaataaaatccgtccacaaaagaatactccgcaagaaccgaggtaaatatattctttatactgctctgtgcacgatagtattctatttcatcctcgggatgaagtattttcccataatccgcttttaattctttttcggagattaagaagtcctctactttttcataatttttttccatttggccaaactgataagaaatacttttttgcaaattttccttcatccatatattttctctgtatcccacatagaaatcataccccgcaaccagcgctgccaccaatacccctaaaaaaatcgtgcgcagtttccaatacactctcagggattttttcctattcgttttccccattctcccaccccgctttctttcggaattccctaggagtcattccaaaatttcgcttgaacagatacgaaaaataagacgcatccaaatagcctgtcttttcagaaatctgtccaatggaaaaccgtgtttccagaagcaaacgccttgcttcattcattctcaatttaaaaacatattccataagcgccatgcctgtcattctttaaaaatcctggacagataatcgggatgcatatgaaaatattctgccacctgtctccttgtaatctcctcctctttgtgctggttaaggtagtccttcacatcattgatcgtgaactcttctttattataattttctttcattattacttcttttttcacctgaacacttgaacaatatatcttttcatttttcaggcaggtttccaaaaattttactacttcaggaatttcttcaaaagaaacctttgtctttacatacaccgaaaaattgcagaatttaagatagcgtctccattttttcaacagaatgttgctcttttccaccagcatttcatccgtttcattttctacgtcatatataattagcatttcatttttttcattaaaaattatatttccagtgtcattttgcccaaacagtaattcagaactaatatttttgatagaaaattgcaccagatcctcatcccattcctggtttccttctttctgcatgatggtgtaataaaccaaaatcggataatatcgctttccttcatggatttttatccccacttcctctgcctttctttggtacaagaacctgttcgtttcatttttcttgatgtatgttttccaaaattccatttttaatatattctcacttattttccatctagatgcttgtttcttatctattccccttttccattcaagttcgaccattgctacagcatttttcattgttctctctaattcttccttgtcaaccggctttagaagataatcaaccaccttcattttcatcgcttttactgcatattcaaattttgcatagcttgtgagaaaaatagttacaatttgataatcatgttccccgatccattccaacaaatcataaccacttcccattggcatctctatatcacacaataatatatcaactatattttctctgataacctcttctgcctgctgtttgcaatacgctttatatacttcatctatccccactgacgtccagtccaccatctgcataatacacttcactgtcatagtatcgtcatctacaatcaataaattcaattttcaatacctcctcctagaatttattctatcattgtttagcgttttctttaacatactgatatgtaataacttttgtcaataggtaataagaaatatagcagcgcttctacaactgtggcagcggcacttctgggatatatagcggaaataaacgaacggtacaaaacttttgacataacaagtttaagagaaaaaccaaagaatgttttcagaatcaatgctgatatgcctatggctgagtaaaaaaggtaatcaaaaaaataaggatcttcgacccatcgatgagtcgaaaacccttaattttactgtatctaatcggggcaacaggatttgaacctgcgacctcacggcccccagccgaatcgcaaaacctttgattttacaagtaattttgagtgtgaaaaactaaaagttctcaaagaagttctcaaaacttagaaaggaggagcttttgtacatatgttgagcatcaaaataagcctataagcggccaatacagtcgtttgtgggcttattttagtgcctgactttataggcagtaaatttaccgcctaataaattacagaccggatttgagccatatacgtgttctaaaccataatgtatatgccaaataaaaatctaatatctaccaggaggaaaaaccgtgctaacaaaaaatgacaacattatagatggagaccaaatttattccgtgatcggagctttgggttcagttttatatatccaaaaagtggattctctgagcagacagcctacatataagctatctgacattgaagcagattaccgtaaaatcgaattcattgcagaaaagccaacctaatggagaaggaactaatagcagtttcttatgaagtcctgctgccaggtccatcaaattaataagcaggacatttaagctgtacaaaattatacaaaaacaacataaggagaaaacattcatggaaataagcaattttaaggaaaaaaaattaattgtggcaagatacttcgtaaaagaaaaaaataaaggtaattatatagacgagaaaaatatcctgcatatgtggaataattatttcccttctgatttcaggatatctccgaagaagaaattaaagctggtgtgttgcggcaaatattataagctggaattagacaaaaaatatacggacgtaccgcagaaggtgttgaacagctacagcaacaagtttgagaaggtgtatagatggataatacattatgtcaaccgaaccagtttacagcaggttgacgcagacattatccgccagcgaaatagacaactaaagacactaaggtacatttacaatccaatgggctataaggtattcatggtgggaaatcaatcatgcacgaatattcgattgacccaatactttgttatatcagaagatagtacaacaaagaaaactggaaactatgcacagctcttcgactatgcggagaagttgaaagaatcacacagcaattgataattacaactatataaatcagtataaaacatatccatattaaaaggcggtagagaccaaaaatcctactgccttttttatgtttagaaaggtaaaaaatgagtaataaccatataaaaataaaacgatgcagtcaatgcggcaaggatttgcctatagacaaatttagattgacaaaaactccgtacggtaaaccgatataccgggcagaatgtaaagagtgcgctgctgaatacaacaggcggtacaaagagaagaagatattaaaaagcattacccttgatggtaatgtagaaatcttccaaaaacgccaatacaagaatatcctgccagagaggatacttgacatttctgccatcgacatagatgtaagtccgatagctccagacgagatatttgtacagttagttgattaccgcaatacctggatatctaactatggacggatgataaggaaatgttgcggaaaatatggactgctcaatggcaataatacttcgggcgaaatttcatatacaataaaaaaacacacatttattgacggcaaatggacgtttaaaagttttgagcttcatattgccaggacagtgatagacacatttatagttaatcctgacaaacttaataatatctgtatctggcacaggggcaataacaagaagaactacaattacaaagacttatatcctcttaccagaaagcagtataaaattgtgaaacataattatgaaattacaggtgatgattctgaggaatatatcttaaaagtcatgaacgatatccgctataagcctgacgactgggccagaagagattttgatcctacgatgtgcggcataggttactatggcaccagtgatgttgatttttcatcagaatcatacataaagtggaaaaatatgatgtaccgctgttacaacgatggtgtgcacagtacttaggatgcagtgtttgtgaggaatggaaaaattacagcaattttaaaatctggtatgagaataacatttacggaacgcaacatcttgacttggataaagacatactgtacaaaaacaataaaacatacagcccagagacctgctgtcttgtgcccaaaactatcaacacgctgtttgtaaataataagatatgccggggagagttgccaataggcgtatatgaggattctggcagttttattgctaatatgacaagtaatggcaagaacataaaacttggcagctacaagacaccagaagaagcgtttcttaagtacaaggagtgcaaagaagattatatcaaagccacagcagaaaagtataaatataaaatcccatacaaggtatataatgcaatgttaaattggcaagtggaaataacggattgattaaatcatggtatattggatagttatgtactgtctggtataccatttttttacttttgagcataatgtcgtaattgttatcgtaattatgatttctgcaatttatcatatccataaaaataataaaaacctgctgatattgggcgaaaatcataaatcgtgttataaatattattttgtaacattatgtaaactaataaataattatatgaatatttttacatcgtaaaaacacataaaataaagaaaatatataatcatatatatgctcttgtgatgcattatgtaaaccaataaaaaactgcataaaataaagcaatgcgacagtttatatgaaaaattatattatcgctaaaaataagtattttttaaatgtcataacataataacatcactactaatcatccattccacatactgtaacctgctgccataaccgtccataataatacccctgctactataaaggataaaatatctcaagtgttatcatccccctcctacctctataaaatatgaataggccaggcataataccccggcctattttaccatctattcgtttgtcacacccagtgctctcagtatcttatatccatccaatatacctgcggcataggcgttctgagtgcactcaaaatttaccagcatccgtttactaatataatcatccacaatgtccttctgatcttcggtcaaatttaaattcttatactgttttagagccacatccaaatccttggcctgtttcttatacatcttgtcagcagagagcagttctgagtaagttatccgcttcccactgtctccagcaagcttgagcaatattctgatttcacttcgtgatgtctcttcattcaatatctcgaatagtttctctctgatttcatcattttcaacttcttcaaatgttcttttcttcatttgcaatctcctcctcaataatacataatacggcaatgcgtatatcttactacttaatggtacaccgttaaagtatcacgctttattctgaaagccaaccttgtaccgttaatatcgaggtataaaagcatctatactcatgttaaccgtacaaagttaaggagagagtataatgacctattcagatgccattattaaacgattggaagaactatgcgccgaaagacacattacaataaataaacttgcgacattatccggtattacgcaatcgaccgtggataatcttatgagaggaaagacgaaaaatccaaagctgaaaacacttcataaattagcagtcggtttagacatgacggtttccgagctgttagatttcccagaaatgaatgaaacaatatttgaggatgaataaaccgggaaaagccgtggattatagaatgcttaaaatattatacaaaaacagtataaaaatcttgtaggaaactgctctatcaacagatgaactattatgatataatattatccatacataggcggtcagtctcccaggtatgtattatgtttctgtaaatggtttcctttcaggagaaatatccccaggagaggaatctaatctgattgctcgttaaaaatgagcagaaggaggttgttatgttaaagaaaattaagaaaagtattactttcctgctaattgtggcactgtgtgcggcgaactttactttcgtgtccggggcgtcagctccccatgttccggtaccaaatgttataaaggtatatggggctgtcgatacgaatacaacttacattactgccataacgaatgtattggctcggtctgatgaagcttatcttaaaagctatttatatgttgagaatggaaaaaaagtaatcggtaaggccaaatatgctggagaatttacacaagtacaaataccaaagcagaaacgagggatacaattaaaaatatatttcaaaaatggtaaggccagaacgaagacgatatacaaagtagtagtgggagatcgggatatttctactcttaaaaaatctaactccttgaagcgaccaaacgctatgtatgactatgatacaagaacattagcaattacagcagcccctaaaacaaaactgacgataaggtcattcaaaaaaactttaataacaactactgtgccagcaaaaggatatatgagtataaagcttcccaaactcaaatatggagagacaatatgggtgtatgtgagcaaaaacaatgtaagaagtgagttttatacctttttaaattatccaacggtttgtataccagaataatctagtaaattcttaaaatcaaaatgtcctctaggttcgatatctaggggacattttattgtactatggtggaaggataccacagctcaaccgccctgttttttgccagtttcaaattttcggccagtatgtggatggactacattctatatctatagaaaaaaacgtttattttttaagttttttgtagccccgtacacggcacgccctaacagcgccatattttaccagattagtgcggattcccctgcaacctctcacatcccatcaggcggtacatataaaggatatcatccattcttgcggtgaagaaatacagattttcaaactgtgactgattaaaagaggacaacaatcatccagagtaagataaaaggagacaaatttcctctgcatacccacagcttttctgccgggaactgacaatgaatttcatatcacgattcataaacatacctccaagaaaaaagagtgtaggcactttgatatcaataggcttacactctttcgggcggtatggttattgtcaaattatttgcttaattttatcctcatgttctgatacgagtatactttgtaactcgtggtatgcttttatatccgatgtagtatggatgatttggttaagttttcgggataagtcaatgtgtccttctgcaataatcctgatattcttgtcagtgacattttccaggtgcaaattgatgtctttaatctgactttcaagacttgaaatcttactgtccaatcctgttactttatctagcaacagttccagcatttccttttcattcatataatcaccctcccttgtactgtatcaaggttgtaccatattttacgctgttctacttttttcaagttccaaaacctttatttcaaggttctcaacctttctcttgagaatattcaattgtaattcattcaatgcatctttatcagataccttaattgccttatcaagtttatcggtcaaattgacgtgattttccgccaatagctgtatatttttgttggtctcgttttccagggacattctagtttcagttacaatgttttcgatatttgagactttagtcccaagattgtcaagacggctactggtctcttgctttaaagtagcaacttcattcagtaacaagtcaagtttttcatcaattgtcatataatcaccctcccttgcatccttgtgaaatgattgtaccaccttccgtgtgtaaagtctattggattttccgaatcaaaacactgtgtcttagcaggacaaggagcctgcatttctgcaagcccccaacagcctatgtcttaatcccagtcaatgttttctaaattttccacttctccagatgccttttctctgtgtcctctctcgattgcttccacttcatccggcaacggtatatcttctgggacaaatctaatcaatactctgtaaatggtttctgcgtctgcatcaggtagtaaatcaattaaactatgcaatgtttctttgctcataaaaacaaccttctttttaaatgataagcctaagcatacatcaaccgtcccttcggttccgggatttcccatcctaattcttctgcacgttctatccactctttaataataatctgcacgttatcaatcactttagctaatgttttcccatctgccatacatccaggaagctctggtacctcagccagataacaatcatcttccttgctccaccatgtaataatttcgtattttggcatttccgcacctcctatgatatatttacgtgtgcaatattattatatccgaaagccgcataacactaatggagagttctacatagctagcgttactattattatcctagaggaacagtggcaagcccgtcctcgttttacttaatcttctaaagttttctgtaagttatcaattaccttatttagcttctcatcctttttttctggctctttttcttcttttgcttcctttaatgcgtcaagcaagaatcttacgaacccgttaaactgtttatccgtcattcccatatcttgaatcatatcccttcctcctttattgttaaagtagcttgcccttctttaactgtttttattatagcattattcgtacgaaccattaagcctttcttatgattattttatcattgtccaaggaaatgacaatctctttgtcatcctgcgtgattcccaaggctttgacgtattcaggcggaagagtaactctcgccatcattgcattcttactggctgtccctccaggcttgttgaatagcacttttcttttgactccttcgtccataaagtctacctcctttattataatgtacactattcgtccgaataaatcaattcatatatttggttcgtacgaattttacaatatttattcgtacgatttgtgaaatatgccaatcgcattattcgtacgaacgatatacaattcaatcaagatatagaaaacgaaacaacaaaacacagaaatcgaaaagcaagaaacagaaaggtggtaaacatatgagagacaacaatatcttaaaagcgattttattacttagaaaagctggaaataagcacagcacaaaagaaaaacagctacaggaagtacatgagtggttatcagaaggctatatgacagacgaagacttacaagagtggatagactggcttaaagaagacctcacaaagacaccagaacaattggaagcagaaggcaaggaatggtgggatacacttaacgagattcatgcggaacagctcatgcaggaaatggctagtgaatacgaagaaaaatcttacgctccttctaatccgtgggacgcgccgggtatgtatattagtgattttatttataatacaaaatgggtttatctgtgaatgggtgttcgctgattccaatggcagaatccacgcaccagtaatatcctcctgttcccaaaacaaatgcacgcagttagggataactgaaaaagggattcatgcatataggcggacagtaaattctaagatgcgatgtagtggtgtttctcccactgtagcggcggcacttctgggacatacagaggaagtaaacgaacggtactatacttttgacataacaagtttagaagaaaaatcaaagatcgtttccaaagtcaatgctggtatgcctatggctaagtaaaagttctcaaaagttctcaaaagaaaaaaggattcccgacccctcgacaagtcggaaaccctcattttaaatgtatctaatcggggcaacaggatttgaacctgcgacctcacggcccccagccgtgcgcgctaccaagctacgccataccccgtaacagattccattatatcaatacctccaaaaaaaatcaactacttttttactttttttataattttcagatgccattattaaacaattggaagaactatgcgccgaaagacacattacaataaataaacttgtggcattattggtatcacgcaatcgacctggatagtctcacgagagaaaagacgaaaaatccaaagctgaaaaaacttcataaattagcaatcggtttagacatgacgctttccgagctgtcagtttttcagaaatgaatgaaactatatttgaggatgaataaaccatgaaaggccgtgaattacagaatactaaaaatattaaacaaaaacagtataaaaaccttgtaggaaactactctatcaacaggtgaagtattatgttataatattacccatacataggcgttcagcccccaaactggtctgttctatgtttctgtaaatagtttcctttcaggagaaatattgccaggggaggaatctgatttgatcgctcgttaaaaatgagcagaaggaggtcattatgttaaaaagaatgaagaaaagtattattttgttactaattatagctttatgtgcggcgaatttcacatttgtgtccggggcgtcaggtccccatgttccggtaccaaatattataaaggtatatggggctgtggaaacaaatacaacctgcattactgccacaacgaatgtattggcttggtctgatgaagcttatcttaacagctatgtatatgttgagaatggcaaaaaagtaattggtaaagccaaatatgccgaaaaatatacacgtgtacagataccaaagcaaaaacgagggacacaattaaaaatatacttcaaaaatggtaaagccagaacgaaaacgatatacaaagtagtagtgggagatcgagatatttctactcttaaagtaacaaacaccttgaaacgtccgcaagcggattatgattttgatacgaaaacattaacaatcacagcaacaccaaaagcaaaggtgacagtaaaagcattcaaaagaactttggccacagctactattccggcaaacggaataataaaagtaaaaatccccaaggtcaaacttggagagaccatatgggtttataccagcaacaaaagtggtagaagtgaatttaccaaaacaagcaatagtaaaatcatttatttgccattggttcaataagtaaattatttgtccattgtaaaagcataaggagttgaatcaagcatgaaaaagaaaagaattttagcaggagtacttagtctgattattgcatttattctagtggtgccagtgaatgcaaaaagtatcacaataaaaaaagagttatataaacttggagaattaaagatttatggagcaataaccgataggacaacaaatgtagatacaatccgtttctttaatcccaataaacaaccatataaactgccacatagctgtaaactttttgtaacagcaaataataaaactattgctacaagatcactaactcatactactggtaccagaggacgctttataaatatcaatattcccaagcagaagccgggaactatattaaagttttactatacgtggggggctggaaacaaaagtaaagtggttactaagaaagtagctgcatttaataaaatagctcctgagagattaaccagaatgctgccaatacctgaaattgatacgagtgtttcaatacctaaagcaaatactattcgagtaaaagcaccaaaagggagtacagtcgtagtgaaaacacacaatcagaccctgtttaagaaaaaaatggtaacgagtgaattcattgatgttaaggtgcctaaaaatcttcccaaatattcgtctatttacgcatacacggtaaatggaaagacacgaagcgatatagtagaaagcttttatcattggcagacaatatttcctacttaagtttagcaaattcttaaaaatcaaaatgtcctctaggttcgatatctaggggacatttccatgtaacctctcgtatcccatcaggcggtacatataaaggataccattcattcttccgatgaagaaatacagattttcaaagataaatctaaactatcactgatattcctatatgaaagagaactacaatcatctagaacaaaataagaggagacgaattgtcctctgcatacccacaaccatgttcacttttcccggtaactgaacttaatcccagtctatattatcatgggataccgtaccattttgtttcatatcattttctgccgctctcaatcttgccgcttcctctggcgttacttttgtaaagtccggatcccaggcaaggactaattttttaataaactccagagcaaaattttgatcctgctctggcaatatttcaagcaatttcgtagcctctttaactgctccattcatgtcacatactctccttacttttgataccttgattatacactatttatgtgctgtatcaatgcgttttatcactatttttaggatagcaagcgggaatcctcggttattcaattgccgagatgaaagcgtcaaaatgtgcatttctgcacgaaacaatagtggctgtatccagcctataaaaaaggaacagacattcgacaatcttgagtttccgcaaaatgtaatttcaaaatagatataacttcccaaagtaccaacctgctggatttttgaaagaaaaagaacaacagcctgttgagcagacgcactgaaataagccccgctggaaccggactttgggagaactattcttttatctatttaagcggctaacttaaggcagagttgacggtatgccggtctctttgtccggaaccagagcctgacgccctcttttgcatacgaaagtatgccagagatacctttcgcaagccgataatagcagaagaaaactttttcctttacaggatctgctgtttttataattgcagcctttagtgcattggtttctgaaatcattgagatcattgccagaaatgccatgcatagggtgatataaaagttaagcgcattgatagcacaaagctttcgtacacggaagttttcgaattggaacatctgctttttacaacggaaatattcttcaatcttccatctggaaaaataggttcttgccacccgaattacatcttctttcgatttaatttctttgttggtggcaagcatcattggatgttctgttatgccataaacaagtaccagataaatctcttttctggatgctgtaatctgaactttcacatgggaaagataggcttcatgtttttttcctttataaaatacactggttttgatcttgccttttctacgatcgcgaagttcggtagcaggagtccattttccatggtacagaagttttcttttggaagtaaggcgaatgacataatcctgtttcaggtcatccagttttaggaacatcttgttatcgtcataaccacggtccatgcaaaaagtcgcttttccaaagagtgcagcgccctgttccattgcattaaaagtgattgcatttgcagatttatagtccttttcagaagatgaatgaatgcgagagaatatgctgacagggtgattgctggtagtaagaacacaagcttctgtgacatgatagccttttttgtatatattttttgtcgaagtgctttcagaaccatcgcggacaataccaagtgactcaaatttataaccatcgggttttacaacatcactatcatcgatgtgaatcactggttgagagggggcccattttttcaccatctgaagataggaaacagccgactttgtaggggtacctttctccagatgcctggaaagtcgatcaacaatgttaatctttttagaattctcgtgaagctggtcaacaacatctgttaagagacaacttttagccgccaacatgccgtaagtgatatccgcagtaaatttacgttcaggtttggagagcagtctagaaattttatttgtaaaagtaagaatttttcgtttcaatgtgtaagtatttgatgtaaaattagccataaggaatctccttctttttgtttagtggattattttgtggtgatttaattttacatcaaaaaggaggaagattccttatattttaggcatttattgaaagttgtttataagaacacagctaaactcaaggttgtgtggatagaactgcggaaactcaagttcgacaatatattgctttgcttattaaaatagtgtatactatatgcatgaaagaaaatctgatacatgcaagaacctgtgtatataatatcaactaccatgtggtgtggtcggtaaagtatcgcaggaagatcatcacagaagacatagagcagacgatgaaaaaatgggctgtggagatcgctgatgagaagggcttcacaatccatttatttgaagctggagaaagagaccatatccattgttttgtttctgcaccacctaagatctcgatctcatatattgtaaagatgctgaagggtattataggaagatatactctccaaaaatatccggaactccgtaaatatttatggaagggagaattgtggaatcattcctattatgtggaaacaataggaaacgtttcggaggaaaacatccgcagatatattgaaaaacaaacgaagtcttactgacaggaaaggggaatgcatatgctcttgtcgagaagagaagtatttttaccaacagaagaacagaagatcattttgggacatatgggatatgcagcatttaaactctggaatgtggcaaattatgaaaaaaggaattacaaagagattggaatgaccagatatccggactggtatgatcagaagaaacggttaaaagaaaatttcttttataaaaatcttccatcacagacggcacaggatgtgctccaacaattggaagaggcgtggaaaagcttttttgtattgctgaggagcagaggggtggagaatccgagaccgccgcgtttccgaaaagagaagatggatattacttttttgaaagatgcagtccggcaggaagaaggaaagatccggctgaccataccaaaacagttaaaaacttatctgaagagccagggtgtggatgctgattatctttatctgaaaacaaagcggttttcagacattcatatcaaagagattcagatcaagtttgatgaaaaaagatatacagcaatagcagtatatgaagagacagatgttccgatgcaggaagataatggacattatctggggatcgacatgggactgaaaaatatgctggcctgctatgacagtgcagggaagacatttctgttaaacggattattgaatattacccattattttgataaagagattgccagatatcaggggatcagtgaccgtcagcagtcatgctgtgggatcaagtacccgaaaaaaacgaaaaaggtacgttccctatatcgaaagaagaaaaataaagttactgatcttattcataaaacaaccagatatgtggctgagtattgtcaggcagagcatatcacaacggttgtaattggagatatgaaggggatacgtaagggaaaggatcttggaaggatcaatcagcagcttcattcctttccgtatgaaaagatcctccagaaactggagtataagctgaaacggtacgggataaggatgatccgtcagaaagaaaattacagcagtcagtgcagtccgaaaagtgataaagtgggaaaagggtttgcccaaagtcagaatcgaaaatatcggggattatatatagatgagccggatatctataatgcagactgcgtgggggcatataatatcctgcgtctgtatctgcaaaaaaataaacttccgtttccggaagcggccggactgaactgtccgcagaaagtatttgtgtaagtccgaaaggactagcaatattgggcacatggactgcccgttatggtagcaccgaaggtgcggcatatagatgctcggtaattcaattgccgagtagttcactggtgtcatttacatatttgagcagattacctggttgcatttccagaattctacaaagagtatctatcgtttttgttcctgggacaatcccagctttcatatcctgcatggttttttcacctattaatttttctttacgtattctgccaggattgtacccgttttcttttagtaaatctataatattaactttaaatttaagcattatatcacctctatattatactatcatttctgttttaatttgccaacactatttttagtgtgcaatgtgcaaaaatcgcctgttacaacacactttttttagtactttcgtacattgcgttttcactatttttagtgtgcgattcaattaagataaagaaaacaacaaaacacagcagtccaaaagatgtagcgaaggtgagagtaccacgtaaaaaccggaaaggataagcaaaggccggctccccagatcaagggcgtaaaaagattagcatgtggttctcccactgtggtaacagcacttctgaaacatacagaggaaataaacgaacggtactatactcttgacacaacaagtttagaagaaaaatcaaagatcgtttccaaaatcaatgctggtatgcctatggctaagtaaaagttctcaaaagttctcaaaagaaaaaaggatccccgacccaccaatgagtcgaaaacccttaattttactgcatttaatcggggcaacaggatttgaacctgcgacctcacggcccccagccgtgcgcgctaccaagctacgccataccccggttacaaatgacattataccaaattgttttaaaaattgcaactattttttatatttttatctgacttaaaaacagctcgttaaaaacagctgaaaaacggctgaaggtaactgtctgaagaaaaatggccgtattctttttatatacatctcatttaccctgtataaaaaatatagtaatattttatcctactatatttacaggagttgttcgtccatgagaccattaaagaacaaggtgagcataaccttagacagggatgtcataaagcggataaaggaattggcagaggatgacaaccgctccttcagtcaatatatcaatcgtattcttaaggattacatctttcatatagatcataacaaagcggacaggtaagggacagcttaatccaagagctgccccttaaaataaaacaaaccttctactcatccagcaagtgaagccgccggatcttcaaaattgcttcatccatgctggatacatctaattttctataaataagctctatgtgggagcgcacggttgagaactgtacgcccagttcctctgcgattttccggtagctgtatccctcgcacataagcctggccacttttttttgctggggtgtaagacggatcctgttcttgtgtctttggccggacagtgtgctgccaaaagatacctgctctgctgctccaatgtacagtttttttacaaaggggccagacagactgccgctgtaatcgcttcgtttggtccagttcttcaggctggcaaagagattcttcagctccgccccatcgttgataaaggcctgttcgtaccccagctcctgggcgatgcttaccgcttcttctaaatactggaatgcctttttacgattgttccctttcatcttccaaaaggttatggccagcaaaatctctgcctcaataatgtccgacggtctgtttaaagccctgcacagctccaggagcttttccagcaggatcacagactgattgtaatttcccaaaaggatatttgcccgggcagtggtaaaatggccgtacaatctgaagaagtccacctgttcgtacacctgtgaccctctggtgtcaagccatttctgcgccgcctctgtatctcccaaatccatccgatttctgcacaggacagcatcataattatactggagataaaaggccttgtcctcctcaatcattttttgaatgtctctttgaaggatttcctcctgctgggtctgcttcatggcatgtgctaccgtaagcagcagaaccatgacacagaatttggattccggggcaaagcttttctggatctccgctgccgcgaaaagagccagctccctggcccgttgaagttttccctgctcataataaatccccccgcagatacaggcctgaagcatggtgtattcctctcccaaaagaggtcccagaatttttccaatgccctcaatctcctcttcaatatttcccggaagcagctccgcaaaatctctgtaagatttatgataatagggcagatacgatgtagcagagccccgcacaccctgaaatccactggattcccctacattggcagccattctggaaatttcctttaacgtcacccgcacgtccattgcatacagaaaaaatatgttatgagcaagggtgggatctctgcgcacaatctgtgggtaatgtgcataatattcatctgcatactgtgaaaactcctggattctgccctcattgcgggctgtaaaagccctcataaaatataggtggggataccgctccagtatctcatcatccaggcaggtgtggaccgcatgcatgatccgctctgtatcaaagcctccccggtccattttctccagcaggtcaaagcagcaggccatctgttcataatccttaatgtacgagaaccgctccacggcatgataaaagtccttttgtcccagataccagacacctgctgcccggatctgtcttttctgatactctgtgggcctttcccaaaaaagttttctgagaaactctccaaaaagcttgtggaaccggtaggtcccgtccctttgtctggacaaaaaagctcccttttctgccagctcttctaaaattctgccgctgtccttttttccagtgagggcattgcacagttcctctgacaattcctcctccatgcaagttcctatcataaattctctggaggtttcctcccacatttcccaaacctgtgtccgaagaaagctttccagccaatccttggacagggtttctgtgggtatctggctggaggaaagaagcagtgcgttaattcctattggccacccttctgtaaatgccaggatagactgggcctgctttttggtaatggacagtttcctgcttttatacagtgcactgatttccgtttctgtaaagagcagctcctccgaagagagaaactgtatctcatttttcagaagcagtccgctgaattcatcaggaagggctcttctgcttaaaatacagatccggatcccctccggaagacgcagaagaaaatcctttaaaatcttcagggcacaggtatctgtcacatagtgcagatcatccacaaccaggttcgcccggctgtccctgggtatggctgtcactgccctcatgaggaactccaccggcgccttattaaaatccggattctttgtaaacgcagatactgccgctgcatattcccctgtgtacaaatccctcaaagcgttcttaagcttataacaaatatccgcagccgagttatcatactcatccagactgaccacagcattgggctcctgcccgctgtccagccattgaccggcaaaaactgttttcccataacctgccggagcctgcacatacataatacgggaatcccaatgctcctgtacaaacttcgtcaatctgttccgctgaatcatgctactcgatgatgtcactttttacctccgccttttcctgtgtaatctcttctgtcagcccgatccttcatgagaaccccttcttcataagaaaatgatatttaagatgttttttatctaatataatatatcatttttatacatcccagtcaattttttatgataaagtgacaatatggttcgttttcaccaccatctggcatttctctgccaaactttgtcacaggactattttttagaaaaagctgcacttcatattggtgaaagcaaaaactttttatatatataaaaagtttttctgaccaccctcacattgaggatgtaatccgcggaaaagtgttataaaattaacgttaggcaaaacctggacagccagaatcggaaagtcctagtaggagaacagacataaattatgtataagcagataaagtcatacttcaccagcggcaaaaggctgttattattttttataatggcggctgccacatgcaccgttttctttgtttttttcatcaccccgctacagcagctctccccaagggaactaagcgatcagggaaacagccagatcatcctctcccattggtgccttctcaccgcagttcccgtggacgttgaaagtacgaaagtaagcagcacagatcgctttggcagaaatgtcatcttcctttttctatgtgtattgcttcttctggcagcagaatttcttttctatttaacaaaaataaagaagaaaaggcagcaattggaaaaagctgaggcagaagcaaaggaactttaccaaaaagcccaggaaaccaataaggcgcaaggctatctcatccgccagctgtgccatgagacaaaggtatttatcactggttttcagggaatagatctaatggcagcgaaaatccctgatacaccagataaggccagtgccttcctaaaaaagctgtcgctttccagtgagcatctgcttttagtggcaaataacacacttgatatgtccagaatccaagagggaaacgcaacgcttttgtataaaccctttgaccttaaggaaattctgcagaaactgagggatttttttcttctcctggcaaaagaaaaagacatagatcatgaaatatttctgacaaatgatgtggaggaatgcataattggagatgagcagtgtctcacacagatcctatgtaatcttttaaatattatatttaagcttacacccaagggtggttccatacagcttcggatcagcaaatgcaaagagggaaccatttacttttctctctgttttcagatatgcttcacctgcctcaaaggggaagaaggaaaacttcaggagctcttacagtccttttacctgaaggagctttatgacgcggacccctgtaggcaatcggatttagaaccaggcattataaattacttctgccaagcaatggggggacagattttcacacacgttcctgaagacggggcctgcacagttactacagaaatcccctttcttaagggttcaaaagcagctcagatgccggacttgtcctcccaggcggctcttcatcctatggaagtcccggatttccacgaaaaacgcatacttcttgcacaggacagtgaactaaaccgggcggtgataggaaaactgatccgcagtacaggggcacagttagacactgttgaaaacggggagcaggcggttacaatgtttcaagcctctccgatgggatactatcatctcctattgatggacatccggatgccggtactcaatggcagccaggcagcaaagcaaatccggagcctgaaacgctccgacgcccacacggtacccatctttgccattacagcggattgttttcctgaggaattacaggatatccgcctttcagggatagacgcacagatccccaagccagtggatagcaagaagctgtatgcccagatgcgtttatacctgacagaataatatctggaaaaaataagaattttccactttaacctgtatggccggcacgaaaaaattgttttcccaaagataaacagggtagttgaacaagcgttcctctaccctgttttgctcatccagccaacacactgtcctcaccggatgtcgttcttcttgtcactcattggtaatgcccagggctttcagcagctgatagccatctacaataccggcactgtaggcgattaaatttgcttcataactgacttcatccttttgagcaagaagctcttcgatcacttccttctgctctttcgtaaaatctgtgccttcatatatttgaatggctttatccagttccgttttctgctttttatacatgtcatctcttgccaataaggtaccgtaggtaattctttttccactgtccagtgctaatttcagcagaaccagcatctcacttttggttgtcttatcagtgagtatctgaatcagggtgcttttcaaatcctcttccttccacttgccttctgtgctttttatcattttctctttcctcccttgcggataaattcatagtatccggtcaatcattcgcaatactattttatactactttctactacttttcaatatttagtcgtatttcttggtatacttatttggctaaaggagatgacagaccatggcgcagatatcatacgacagcccaaatgataaaccgaaaaaatctaaggttagtattaccttagactgtgatttaatcccacagataaaaaatttagcggagaaagacgaacgttctttcagtcagtatgtgaatcttatacttcgacagcacgtgtgtgaaaaagagaaagaaaatgagtaacgccttttcattttagctttccttggcacattgtgtacatctgtaatataaaagagagtttcccacattccatatgggaaaccctctttttctacttacagatgctttattattttctacttatactctccctcaccggtcaagcaaacctcctacccatctccggatctccgcaatctcacctggagtaccatgattaataatacgtattcggtcaggagcataataggtaggcatacaatcaggaacatttaaatctccattaaaatataacagcagaatatctccatcctttatgttgctcacactgcttttacgcccgccatgggtatagattggacaattttttctgatattacaccgggcgatcatcttatcggcaagtcctacagtatagcctcccatatacatgacttccaaagtcttcatattgtctggttccaggatcccttcttttatcatggcgtttttaaaagccttcaccctggattttccaatataaaagctccatttatttccgtagatcgtagtatataaatagccatcatcataaattctcagggtcaggccctgcctgttataattttcaattatataacggcccccaatatatttgtccttatttttaatattcattttgccattcaagttcttggcattggtggctgaaaacagatacttccaaacagcagacatatccttaggcttaaaatgacagccatcactcttcttgcggaagctgttaaatttaagatttcttttcagccccagcattgtaatggcttcccccagggttttgggccggtaagccttattataatagatattgtagatcgtgaagtttccaattttcaccgccactgctgcttttggtgaaatgcccttcaattgataactgtaaattctgtaggtagacagtccgtcttcagaccggaagactttggaatacaattgtctcaccacactgctgctgtcaagcttggcatatgtatgtgtgtaagtattgttccgaaatttcagttccggaaaccactcatctaccgtattggcccttggcggctcataagaatccttgggataaaccatataaggttcattgtcaacccattcaccgcttgataccgctccttttacctccttggccggaaacaccagaaaactttctgccagcagtatcattgccagcattgccgcaaaaaattttgttttcttttccataaaaaacaccccttccatcctttctgtatttgatatccatctatttccctatgttcattcataaggaaataaaaagctgctaattatacagtaggagaacgaggtgtctatgttacacttttttagaatttatttattcttttggttaatataattcacaaggccctctgccttaatgatcttctgcataaattccgggaaagcctggcccttgaactgggttccctttgttttgttgtagatcatgccggagtcaaagtccacttccacttcatctcctgcttcaattcccttggaggcctccgggcactcaataatgggaaggccgatattaatggaattgcggtagaaaatccgggcaaaggtctgggcaatgacacagctcacccctgctgccttgatagctatgggcgcatgctctctggaagagccgcagccaaagtttttgtcagcaacgataatatcgcctttttttactttgtttacaaagtccttgtcaatatcttccatgcagtgggttgccagttccgccggatctgaagagttcagatagcgggctggaatgatcacatctgtgtccacattgtccccatatttaaaaacagttccctgtgctttcatctgtcttacctcctataatcccagttcttctggtgcggaaattttgcctgtaacagcgctggctgcagccacagccgggcttgccagatatacttcagaatccacgtggcccatgcggcctacaaagttccggttggtggtggaaatacagcgctcgcctgctgccaggattcccatatagcctcccagacaaggtccgcaggtaggagtacttaccacagcccctgcctcaatgaagattttcaaaagtccctcttccatggcctgaaggtaaatggactgggtagctggaataataatgcagcgcagccccttcttcaccttacggcccttgagaatctgagcagccacacgcaggtcctcgatccttccgttggtacaggaaccgatcacagactgatccaccgtcacttcctgagtgatctgggaaatggtcttggtgttttccggaagatgggggaaggccacagtgggctccagctctcccagatcaatggtatattcttcatcataaaccgcatccggatctgcttcatagactttaaagggacgtttggaatgctccttcatataggctaccgtcaggtcatccaccgggaaaataccgttctttccgccggcttcaatggccatgttggcaatggtaaaacggtcatccatggaaaggttcttaaggccttccccaacgaactccatggatttgtacagggctccgtccactccgatcataccaatgatatgaaggatcacgtccttgccgctgacccatttcttgggtgttccaacaatgttaaattttatcgcagagggcaccttgaaccacgctttgcctgttgccataccggccgccatatcggtgctccccacgcctgtggagaaagcacctaaggcgccgtatgtacatgtgtgagagtctgcaccgatgacaacgtcccctgctactgtcagtcctttttcaggaagaagggcatgttcaattcccatctccccaacgtcaaagtagttggtgatgtcatgcttgcaggcaaattcgcggacacatttgcagtgttctgcggatttgatgtccttattcggaataaaatggtccataaccagggctattttttccttatcaaaaacagtgggcacagtcattttctccatctcatgaatggccactggtgatgtgatatcatttcccaataccaggtccagatcagcctcgatgagctgtccggcttccacataattcaatcctgcatgagctgccaggatcttctgagtcattgtcattcccatggtagtttcctccttaaatcttccaaatcttttctcattcactgttgccattgtagcatagttcctgttataattaaaatacatattatgaatattcattataatctatacttatagcaaaaggaggttatagaacatggaaacctcgttatctctgtatcacatcttttatacagttgccaaatgtgaaaatatttcaaaagccgcctctgaactgttcatcagccagccggccgtaagcaagtccatcaaaaacctggaggacgccctgcagaccactcttttttacagaagctccagaggcgtccgccttactgaagaaggacagcttctctattcccacgtggaaagtgccttctcttccctgactctgggagaggagcggctgaaaaactttaaggaccaccatatgggccatctaaagatcggagccagcaccaccctttccaaatacgtgctcctgcccggtcttcagaaattcatggccgactaccccaatatccgcatttccctgtcctgccagtcctcctcctatacgaagaagcttctggaggacgggaaactggacgtgggcattctgggcaccacctcctgtaaggacccagccccctgccataccctgggtaatgtggaggatatcttcgtggcatccccctcctacctggagcttctggagctggctccaggctccttcagcgcccaaaagctgtccctggccaccctcatgcttttggaaaaagacaatctgtccaggcagtatattgaaccttacttaagctcctccccggtgtctgtacaaacctccaacaccctggagatcggcaccatggacctgctcattgaatttgcaaagatcggcattggaattgcctgtgtcatacaggaatttgtctgggaagaattaaaaagaggaacccttgtcaaggtccctctcaccactcccatccccaggcggaatatcgtcatggctatccattcccttcccacagttattgaaaaagagaaatttttgtcctatttctctgttataagcagataatcaagcgggcagccctgcttcagctctcccgcccctcactcataaggaggttgacggaattacgctcaatgagctggcagggcactttgtagcatgcctttgtatcctgaccctctaatttttccaccataacccgggcggcctgatatcccaggtcatgaaggggcaggcagatcgtggtgagctttggagaaaaccaggtggaaaattcccggttgtcaaagcctattaaggaaatatccttacccaccttcagaccctgttcttccacgtacagatacacgcctcctgccatcatatcattcatggagaaaatgtctttgatcccccggtccataaggacttttgccccctggtagccggaatcccgctcccagtctccataaaccacatcctctgggttaaaacacagggacatttcgtacaaggccttctgcacgccttttaacctgcactgcatatgaaagctgtcctggggacctgccaggatacccaggcgttttttctcaccgttcataaggtaacgtgcggcgtcatagccgccctgctcatcatccacaataacagcgggaatctggggattccccgtaaatccgtacacggtcacgatggggagggggaagttgtcagggaccagggccagacgtctttcatggccgcccagataaatgatccccatcacctgctttgccatcatgatctcaaactcttcctctacctggtccttataaacctccttgtagtagtaatcatagttatattttttatgcagccgcatgtttcccagaacgatctggtacctgtgctgctcgcagaactcattgatgccgtccacaatctcaggcgtggtaaaggtggttagatcctccgtgatgacaccgatcgtcctggtatcatgctgggccagattttttgccacaaaattgggcctgtaattcattcttctggctgtctccctcaccagctttaccgtgctctcactgggccccggcttctcattgagcacattggaaaccgttgcgatagaaacatgacaagcctttgcgatttctttgatccctgccatttctatttgtccctttcttctagttattccttgctgcctcttatcttacaacaattctttcatccacacaagcatttcaccaggttcccggttgttccaaaatccatagggcactgcggtaaagctggcctgtgtaagaactgggaccttctctttgtacaactcctcctctccccagttttccatagaaagccgcttccccaagaattccaaggtaaggcagcctcccaaaagatccttcctgtaaacttcctttggctgtgtcctggtatctgcatatatccctgccagatttgctccgttgtccgcctcttccagggcatacaccagaggtcctttcaccagacagaccttgccgctgtccgcccggacctgggggttggcccgcaggaacaaaggacgcatggcaaaggatacgcgaagcatttcctctcctttcaccaaaatacatgcatagcctttttctatttgaaaatcccgtcttcctgcgctgtcctctatgataaaatctttcgcatactccgggatcctgatacacagtctggcagaaaagctgctgtgggtgcggatgttcacgcagcccttataaggcatctcactgtccacccaaagctccagctctccctgggccagggcgatcctggttttattggatataaacaaattcaagcataccttttcttggtctgcactgtaaatgtactgtcccagagaggccagggtgcgggttacattgggcggacagcaggccactccaaaccatctctgcctcactggcttcacatgttccagagaggttctgggaaggcagttgtctggccacacctccaggggattcacataaaaaaatcctttcccgtcctgggagattcctgataaaaccgtattgtacagggctctctcaaccacatccacatatgctgcctccccagtgacctggttcatacgaagaccgaatagggctaagccgatggatgcacaggtttctgaataattccggtcattgggaagatcatagtctgtggtaaagcgctccaaaatccctgaggacccgatgcttcccgtaacatacatcctccttgtgaccatatttttccacagtctttcgcaggcctcaagcaggctttcgtcctgataagcacttgccagatccgccatagcacagtagagatacacggccctcaccgcatgtccctctgcagtctcctgctctcgcaccggcaggtgggattgtgaataaatgggcagatagccttcgaattccgggaaaataggctgatgatccggccgttttttctcttgaaggaagtaattttccccggttcctctcacatctacaaagtacttggcagtgttcaggtaacgtgtttcaccagttgctctatacagcttcacaagagccaattcaatctccgggtggcccggatatcccctctgctgtccctcttctgccccaaaaactttgcagatcaggtcagccattttgcagcagatatccagaaattttcttttcccagtgctctcataataggccacggcggcctcgatcatatgccctgctgtataaagctcatggccctccataagattctgaaaacgccttttgggttcctttatggtaaaataggtatttaagtatccgtcctcacactgggctcttcctatgagatcaatgacctcatccgcctgcttctccagctgaggattttcgtggctggccagggtataggccgctgcctccagccatttggcaatgtctgtatcctggaagactgctccgtagaattctcctttcatctcccctgcagctatgcggaaattatccaggcagtggctgggaagcgcatccgggacacggtcattgagtgcctcccactgatagggcagaaccgtggtttccaccagggaaacatagcggtcccaaaagtggtcttgaatctgtatatcccgtaggggaacggagtacattctgttcttttccatattttttcctcatttcttaacctttaatacctgtcatggtgatcccttccacaaaatatttgttgccaatcaggaagaagatcagacagggcgcagtaacgatcaaagccagggccattacctgctcatagttattgatcctcatgccattgatcatatacaaacccagagtcagggtataggatttctctccctgaagatagatcagggtatagaaaaattcattccagcagttaataaagctaaaaagagcaaccacaatcaaagcaggctttaccaacggcagcatgatctgggtgtaaatccgaagctggcctgccccgtcaatgcgggccgcctcatccagctcctttggtatggtagaaaagaactggcgcataaggaacacaaaataggcattgcctcctgcacacagaaaagccggcacgatcagaggcagctttccacccagcaaagcctcctgtccaacccatccaaaggcgctgtacatggtatactgggggatcaaagtaactgcgctgggcagcatcatggtggcgatcacacacacaaaccagaaattccgaaaggggaaacgcagccttgcgaaggcataggcagacaggctgcaggtaagtacatttcccactacgtaggggatgacaatgctcatagaattaaagagctgccttccaaaatcgattctctccatggctgccgtaaaattggaaaacatcattttggagggccagatcaccggaggacgggtgaagaattctgccttggtcacaagtgcacagcgcaccatccagaacaggggaaaggccacaaggatccctaggatgctcaccaaaaagatcagtagataatgggtggcttttgacctggtatttttcatctgcgtgccctcctttttcttttttcttctccgtcttctttcttaaaggttcccccaagggcaaacaaaagcaacgccagggtaatggtcaccagaaagaccacccaggcctccgcacttgccagcccccgcaagcccaggtctttaaagctgtgctgatagatcatcacattgaggaaataggtcatccggtcaggtcctccattggaagacagggccacagactgggtgaagatctggatggaggtgaccatgcacatgatcatctggaaaaacagcactggcttaatggtctggaaggtaacctccttaaactggtgccaggcattggctccatccacccgggccgcctccagtagctctctgggcacatcctgaagagtggccagaaacaccaccgtggtgcccccgcaggtccacagactcatggcaaacagcaccacaaagatcagatgcttatccataagccattcctttggactggcccctaaatacaaaagaagctggttgatcaggccgccctgggcctggttctgcatcatcagcttccacaaaatggccgtggtgagcatggggaccacacaggggagataatagatggcccgaagcagatttcttcccaggaatttccggttcagcatcagggctatgaccaggcagaagacaatgaccaggatcacgttcaccacagtataaaacaaggttacctccagtgattttataaattcagagctgttgttgaacagcagatactgataattgtccgcacccacaaaggtcttctccccctttgcgtcgattttgaaaaagctgttgcccaggctggccagcatagggtacagggtgagcaccagcacaccgataatggccggggctgcaaagagataccctgtcactgcctcccggataaaaggattctttttcttcattgtctctcctctcctattttccactctcagcacccaaagaagcggcggcggcaagcttcctctgaatacatggtatgggaatgcatggttatggaaaaaaaggccggacgtgctgtccggccttaagtcctggttattctacagttcctgtctcaaacatttccttcatagccggcatgcaggcatcgaagacttcctgaacggattcctcgccgccaagggctttatctatgtattttgtatattctgtattcattttattgtaggcaggtacatagtaagcaggccactgggcaaccgcaccgtctgtggaacaatagcttaaaatagtatctcttgcatctacaggaagctctccggtccactggtcaatgagcgcctggtctgtataataatctgcctggttgggaagccatgcacctgttttcagaagttccaggttcttggccgggtcaaccatgtaagcgtagaaatctttcgcctcctccagatgcttggaggtattgtatactaccagaggagctccgcagttcatggttacagccgcttccatcttaggcagcacaccaacccccacattcacgccttcaatggcagggatattggccagatcccaggagccgttggtatacatggcataaccgccgcttccgatggtggcatccacggagccgatggaggagttaaaggtatacagtgccgggctggccacatgatacttgtacaccaggtctgccagattctgaagtccctgggcggattcttccttgtcccacaagaattccttgccgtctgcagataccacgccgcctccgttggcatacatggcccagaactgatggaactctctcaagcagttaaagcccagaccataggtctgaattttgtctggatcaaagtcctcctgggtggcattgttcccatcaatatccacggtgagcttctgggccgtctccacaaattgatcccaggtccaggcctcctccacgctggtgggtggatagtcgatccctgcctcatcaaacatgtctttgttgtagtaaagaagcatcagctggttggacaggcccacaccgatggtctttccttctgtatttctaatggtaacagaattcagcttttctggaatttttccgtcagtgaacagatcgtcaatgtctgcaagaattcccatctcattgtatttcataatatctgcctcgcccatgtagcttacgtcaggcagggtatcggattcttttcttgtctggatgtaggtctcaaaggattcatcggcaggcagggcctctgcgttgatcttcaccccggtctcctcttcataggctgcacaggcctgttccaccaggtccttctgaaccccgtccgcccagtacaaaaagttcagttccacgtcctctgctgcctgaacagtcaagcttcctgccccaagacctgcagtcatcagtgctgccattcccaatgccagaatttttctctgcttcatttctttacctccttataaaacgttttaaatagttttgataaaaataagagtttttccatggaaagccctcttattttctaccatttccctagtttctatcttatgtaatatcataaatatcagggatatgcaaacctattgataatgataaaatcgctggatatcttctattttcttctgatattttgctttttcttctgtttttatatttctgtcattttgtataattttttaattttctaaaacgttttatatatgcattttatactatttgtttctagttgtttttcttatgggattttgcaacctctttagaaagaaactcacccatcaggaacttaacagccttgtgcgccaatgtgcagctgggatgcagctttccttggcaccttgtatgaacaaaaaaaagaacggataccgtctctatggacagtacccgttcctgtaagtattgatgatgaaccgctcttagttgttgatgagcttctcttcgccgttccagctgtacagcttacggatgtcttctcctacgatctctgaaggatgctcggatgctttctttctcattgccttgaagtgtacctggcttcctgcggaggacatatccagtaagaagtcttttgcgaaggtaccatcctggatatcagacaggattttcttcatggctttcttcgtatcttcggtaatgatctttggtccggtgatgtaatcgccgtactcagcagtattggagatggagtatctcatgccggagaagccggactgatagatcaggtcaacgatcagtttcatctcatggatacactcaaagtatgcgtttcttggatcataacctgcctcaaccaaggtctcgaagcctgcctgcatcagtgcacacacaccgccgcacagaactgcctgctcgccaaaaaggtctgtttctgtctcagtacggaaggtagtctccagaacgcctgctcttgctccgccgatggccagggcataagccagtgctctgtccagagcttttcctgtgtaatcctgctcaacagctaccagacagggaacacccttgccagcctgatattcgcttcgaactgtatgtccaggtccttttggagcgatcatggtaacgtccacattcttgggaggcacgatgcatccgtaatgaatattgaagccatgagcgaacataagcatattgccctcttccaggttgggttcaatgtcgtttttgtagagtgctgcctgcttctcgtcgttgatgaggatcatgataatgtctgctttttttgctgcttctgctgctgtatatacctggaagccctgctcttctgcttttttccaggatctgcttccttcataaagtccgataataacattgcatccggattcctttgcgttcaatgcatgtgcatgtccctggctgccgtatccgatgactgcaatggtctggccctccagtacgcccagattacaatcttcctggtagtaaatcttgtttgccatttttgtatcctcctaaaatttagtaaaaatatgttaagggaaaaacccctagccaactgcttcaatgaatcctatttcgtgactttcttttccagtgatgtgtgcatctgcagagaatctccttataaagacatcacgtcctctaaagtaagtacatcgctggttcctctggataagcccgtgatgcctgtgcgggcaacctccagaacctcataggtttctaaaagtcccataaacgcatccagcttgcttttcgttcccgttagctccacaaccagagaatcatgggccacatcaatgatcttggcacggaaaatatccacaatggataatattttctgccggtcctccggacttgccgccaccttcacaagaaccagctcccgggtgacgctctcttccggctccaggatcttaatatccttaacatccaccagcttagcgagctgcttggtgatctgttccagtatcatcacgtctccgctgcagacaacggtcattcgcgtataacgcacgtcagccgttacgccggcggaaaggctgtctatgttatatccacggcggctgaaaagacctgagatccggcttaatacacctgctgtattttccaccagcagggaaatcactcttttctgcataccccaccttctttcaccactttaaactaataaacattcatctgtttaccattataacaagataaattattttgtcaattaataaaatgcagaaaatatgtctgtaaaacacatttcctgcataactgtaggagaatttccagagattctcccgccggacctgtcaatctcttctttatagactagagatattataatacacttttacccaaagaacaatctacaacattgacaaaaactgccgttactttaaaactttaaaactcaattcgtcttactgccacctgctttaaaagtgcttcgctgtgggacaccacaatcaggccgattttcctctccttcacttctttgagaagaaactcccagatctgtccctgggtgatgagatccagcatggtgctgatctcatcagctatgagaaattttgtctgctcccccagagctctggctatgcagaagcgctgaagctcccctccggacagctcctggggataccgggtcatccagtccggctcaattcccagctcctgaatgatcctgggagagacgcccacgccgtctgccagggtatccccaagcttcagcctgggattcacggccctctccgggtgctgccagatcatctgcaccggacagtatcccttctggggcaggggctttccgtccaatagtacctgccccttctggggctttaaataccctgccagaattttgcacagggttgtttttccaaatccgctggggcccatgacggccaccctctcaccggtctctacctggagattcacatgggaaattacaggctgctccttctcatcataggtaaaaaccaaatcttttccttccagtatcatacttcctcctgccataagggtctagcggccccttttggccttcgtggttttttcagcgtgaaccatttcctctggtgtatgggtatgctccggacagtccccatggctgtgcctgcagctgccctgctctccatgtatatggtgcatgtgatgggcatggtgtccatggtcatccagtgacacaccgccgcatttcaggcagcgtacagtcccgcagcccacccgcatcattggaatgtcaccagtacactcctgagagaattgggggcacctgggtccaaagggacagccctttggcatgtccttcacatagggctggttgccaggtatgggccggaagccattctgaggaagggccctccaaagtgcttttgtataaggatggcgcagagtctcttcccgggcgaaatcagacacaggggcttcttccaccgtggtgcctgcataaaatacagcgatccggtcagcgatctccagagccagctcaatatcatgggtaatgagaagaacccctttcccctcgtctgcaaaccgccgcagatccttcatagaacgtttggccaattccagatccattcccggggtgggttcatctgcaatgatcagctccggatctcccataagggcagaggtaaggagaattcttctggtcatgcctccagagcactcaaaggggtaacgctcatccacctcctgggacagtccgtaccgctggaacaagcttctctgcctttttttcacttctggctgacggctgctttggcagatctgccgccccaccttcatcaggggatccaggtaagtggtgctctggggcaccagtgcgatctggcggcctctaagctcctccattctcttggtatccaaaagctcgccgtcataataaatctctccgctcacctgggcgttatagggcagaaggcccaggaccgcatgggccagaaggctttttccggaacctgaggaacctaccacagcgacgatctctccctcatggaccgatacatttaaatgtgaaataaccggaagaagggtctgcttggtgcctttctcatattgggtaaaacctatggataaattttctatttctaaaatatgccgtttatctacacaactcatatttctctcctgtatacacggtttttgattccttcattattctatcatagtaaaaaaaataaatccacacaagcctcccagggggttattttttacagctttatatatagtaaaaaagcactgaaccctggccccttcccagaagttttcctcctggagggcagcccaagtttcagtgccttttcttgtcttataaaacatatcgttcaaaaatacaaatattcaaatggatgatcacatcgtgcactggaataaaagatgtttggaactactggttctatagaaattttcttatgcagcgtatacgttggctgctttcagctttctgctgtctcttgggtcagcttcggtatcaaaggttaccttctggccttcatcaagacttttgaatccattggacataattgcggaaaaatgtacgaatacgtcctttcctgtattatcgtccgtaataaatccaaatcctttttgtgcattaaaccattttactgtaccgttattcataatcagtacctccattataatatttgtattaattagacaaaaaaagaagaaaccttgaattaattatgattcagggttccttccggtctttgattcaaattaacaactgttgttactttatcacgtcagggattaaatgtcaagaacattttgaaaattctgattttcagggcgtaaataaaggatctgttttccaggttccctttttctgcctatggacttgataaagtaacactagagcacatcacctgcagaacaaagcggacaagcccgcttcaactccccgtctgcatttctgcttaaggggagtttcataattacgatattgtattataattcatctgcctgctccaataccatccgttctaattccctgctgatatagaatcccctctgcttcatttcctcaattaccggagcaatcttttcaataactcctgcctttttcgccttaagaagaacccctattgtcccggtaactgtaagtccaagatattttgcagtctttttcgccgcattatcatcaattagaaccaaatcagcttttggtttttcctgagcaagaatcataacctcaacttcgccatcgtgcagctttgccttatacattttcttatctgactgatcagatatgcattcaatatgaatccattctttttcaccgatttgtctgcacgccgaatcctcttttgctgtaacctcattaaatactgcccgcgggattacaatcactccatacagcttttgtaaaatatccaatcttccaattttgcatagcacaatgaggggtgttgaattcacaattaccctatgcattagccacttcctccaaaaattcctttttgtcatcaaaatggaatattgaaatattgttatctcccagatattctataaaatcttcttccgtcattcccgcaatctgcgcacaatatccgatagaaacaccattttgtgaataatagcataaagcaactgcacgtctcgcaaatttattcgcctcttccggtgtcatatgtgtatcatataaaactgcctctggtatatttattgctatctggcacataaaatccctcctaactgctttggctttctttcattttaccacaacccgctgctaaagtcattttgttttattcactaacatgaaaaaagaacattttgaaaattctgattttacttctatgactcataggaaaaaatcggttttccggtttcagcatcccagcggatcttcatgagcatggcatggcggttgggattgtacagaggatttccctgaatcttttcttctgtcctggcgtggtataccataatgggatttccttcctcgtcctctgtaaaagagttgtggccaggaccgtagattcccctggcggcatctgtctgaaggaccggatggcgctcctttgtccaagatcttgggtccaaaagatctgcgtcctccctggcgctgagcattcccatacaataggcagctcctgtctccgaggctgagtaggtgaggtagatccttccctggtgatggatcactgccggaccttcatttacccagaagcccactctctcccagtcataatccggcgtggtgagaagcacctgaatggtctccagcttacagggggattccatcctggcaatatacaaattggaaatctgaggtcccacgctcaccttctccgcccacacaaagtagtgctctcccttattttcaaaaactgtggcatccagggaaaacgcctcaaaagaaaaaatatctccctgggctctgtgcataagtcctttctccacccagactccagtaagaggatcctcgtcggtacattccaaaacataggggcggatttcccatacgtcatccacatctcctcccgcaaagtaaatataccagcttccattgagataatgcagctccggcgcccagatatgttcactcatgatccccttctcgtgctttgtccacacagtgacctccggagcgttctgaagtcctgccagggtctgtgctctgcgaagcacgatcctgtcatattggggaaccgaagcagtaaaataataactgccgtctgtatgcttgtacacataaggatctgcccgctgcaggatccacggttcgttgtatcttaagatgtctgatctactcataatttgtctccttttttattttgatttatctaaaataattttatttattataaattatatctccttcatgccagaattgcaacccttttctttcaggcagcggattccctgtattttattgatttcaacacatttttacttaattcagttgcacctgaaaataaaattcgttataataaatcattaggataaataaaggagaagaataccacatgctttatataaaaaaccttgatgacggtattcccatattcaaagctctgggttctgaactgcggatcaacctcattaagcttttattggaaaataaagaaatgaatatgaatgaactggcttccagtcttggaattaccaacggagccctcaccagccatgtgaaaaagctggaggaaagcggaattgtgacgattctcacagagcaccccggacatggcaatcaaaaggtatgcagagtaaacgtggacaagatcctggtggatgttctggccaaagacaccgaatctgccctggacagctattccatcgatatccctgtgggccattattttaactattctgtttttcccacctgcggtctttccacctcccgcaagctcattggtgaggttgatgacccccggtattttgcccaccccaaccatgtggatgcccagatcgtatggtttgcaaagggccatattgattaccgcatccccaatatgctcccccccggacagcggatcgaccagatcaccatctcctttgagatcagcagcgaggcgcctgggatcaacaatgactggccctctgatatctccttcctcctcaacggcatcaagctgggcgtatggacaagcccgggagatttcggagacgtgcacggcatgttcacaccagactggtggtttcccaactggaatcaatatggacttttgaaaatgctggtggtaaacaaaaaaggctgcttcattgacggattaaaaatttcagatgtgaccaccacccagctctccctcacctctcaggatgacctgcggttccggttccaggttcaggagccagcccgcaatatcggcggcatcaccttatttggaaaggatttcggcaattataaccaggacattaaggtgcgtgtgaactatagtcccgcaaattaaaaaggctgttcccagtatactcactactggctgaacagccttctttttaccatttcttctctatgtctggacagcgctgcaccttcagggctgcccgcagctccacaaagcagccgcagagcctgcacattccatttaaaagatgatcacactgcccgcagatcttcagacggttctcatacacttcctgctccacccgcagatcttcatccaggctggctatgtaggcatccagctttttaaaatacgcctcctgggattccccccggataaggcaggctctgcacaccctcaatccctttttcatgacttttcttttacagtgagatgaagcacggctcttgggggaatggtaaaggaaatcccctggggcgtgatcttcacatctgtaaatttctctgctctcaccacttctggttcctcaaaggtgttcctggcgttcatgtctccacagacaatctctccttgtacagactgaaccgcctggtccaggatcactgcatccacctggcagctctcttccagggaggcatttgtcatggtgatatgaagggtgccgtcttcttgtacagacgcagactgggtaagccagggaaccttaaattcctcctgggtcccaatctcctgtgtatccacagagctttccaccagcatgccatcctggtgatgcttgtacagatcaaacacatgataggtgggtgtgagcagcatattggctccctctgtgaggatgactgcctgaagcacattgaccatctgggccagattggccattttcacccggtctgcatgctgattaaaaatattcaaggtaatccctgccaccagagcgtctcttatggtattctgctgatacaaaaatcctggattggttcccggctccacagtataccaggccccccattcatccacgatcatgccaatctccttcttgggatcaaattcatccataatggtgccgtggcggcggatcagctcgtccatataataagccttattcagtgtcttataccagaccttgtcatcaaactgtgtggcgctgcccttcttctcccagccttccggatgtacataataatgaagagacagtccgtccataaatccatgtaatttagggtcactatgggaaaaacaggttttcagcacctctcttgtccattcatagtcatccacattcggcccgcagcagatcttctggatatgggcatctgccttataatccctcacataggtctgatatctgcggtactcatttccataaaaatccgggttcatatttcccccgcagccccagttctcgttgcccacgccgaagaaatccagcttccagggctttttgcttccgttgcgggcacgcaggtccgccatgggagaaaccccctcaaaggtgatgtattccacccactcagacatctcccgcaccgtgccgctgcccagattgccgttcacgtaggcctgacagccaagctggctgcacagctcaaaatattcatgggtgccgaagctgttgtcctccaccacaccgccccagtgagtgttgatgatcttcttcctgctttccttgggaccgatcccgtccatccagtggtactcatcggcaaagcagcctcccggccagcgcagtaccggaatctgaatctttcgcagggcctccaccacatctgtgcgcattcccttctcattgggaatgggggaatcctcccccacatagatcccttcataaatacatctgcctaaatgctccgagaaatgaccataaatctccttatgaatcctgctgagttttctctttggattgatcactaattttgccattgctgaactccttttattctgtcatattcttaatttccactgccatcgcccttgctgtaaacaaaagggacaggcccttcatccccctgttctctcattggcgggaggctttcctgccctttgccaaggacatgctgtattaattattataacttatcacaaggaaatagcaactattttttatattttattaaattaatttatatttgtatgaacaaccattgtttcaagaactttcctatgcaagaacaaagcgggcaagcccacttcaactccccctcccctcactcatgaggggcttggcagctttgtgcgccaatgtgcagctacaaagcagctttcctttgcacattgtgtgcatcccccgaagggtttttattgtatgggaaagttctaagaactttcccatacaataaaaataagatgctgcccatgcgcacagcaccttatttctgcccgtcctttatttatgaacactgcctggatccagcagcttacgaagggaggttcctcccagatcaaacaatacaacggtcaaaaccagcattaatccagggaaaagggccagccaccattttcccatgaccagatacttcatgctctctgacaggatcaccccaatggccggctgttctgaggacagcccgaagcccaggaaggtgatgctggattcatggagaatggcatggggaaaggtaaggaccattcccaccaaaaactggggcagcaggtggggcagcatatgctttcttgcaatggccagcctgctgtgtcccagctttctggtaatctggatgtattcgctctccttaagctgcagaacctcagcccggatcagtctggccagggaggtccagtgtgtgagagcgactcccacaataactcccttcagccccttgcccagggcataggagatcagaagaaggagaagaatatgaggaatccccatgatcagatcaatgatccaggtgatcaccgaatccacctttttgccaagagaggcggcgcagatacctaaaatcagggccatgatgccgctgactcccgctgcgcatacgccaatgagaatactcatggacaacccggtgagggtacggtaaaacatatttcttcccatccagtctgtgccaaaggggtaggccaggcagggagcgatatttttcctggaaaagtccgtctccatggccaggtcatggcagaaaatcccggcaatggtcaccgctgcgaggaagaaaagagctgccataagcaagaaaaacgtcttctgtctctgattccatctcatgaccgccgccctcctctccggatgcggggatctacagctccatacagcacattggcaaagaagttgcccaagaacacaatggctgctgttatgagggtgatccccatgagaaggggcacatcgctgcccgttcccgcagtcaccgccgcctgtccaagtcccggataggaaaacacctgctccaccaaaacggaacccccaatgatttcactgatggaagcaaactgaagggtcatggcaggaagaagcacattgcgcagtccatggttcttcacgattttccacaggctctccccccttgctcttgcaaagagcacgtaatcgctctccataacatcgatcatcttctctcttgtgtgaagggcaatgttagaaacccctgtgatgcttaaggtaagggccggcaggatggcgtggcgcacccggtctaagatagtcaccgcatctgcctccagcccgatgggcacactcagcccgatgggcaggattttcagccacacactgaagatcatcaacagcagcagagccagccagaaggtgggagtgctggcgatcagcagagaatagcccttgatgattttatccggcagtcttccctggaacacacctgcaagcacacccagcacaaagccaagaagcccggagatgatccaggccagtcccatgagaaaaagagaattggacagctttacggcaattacccgggacaccggctgacggtagagcaggctggtgcctaaatctcccttcagaaaatcccccgcccaattcagataccgtttcaccggaggttcatccactccccagtaggagcgcagcttttctttctgtgcttcactcatagacccaagggccgcctggcccacattggcctgcaaagggtcaatgggggaggcggacaccagggcaaaggttacgatgctcactgccatcaacagcaggaccattctgataaagtttttaatgacaagttttccgttgtatttcagcaagatttcttactcccagttccattcatcaatattgtttacaatggaccatccatgtccatggggatggatcttctggtcagctacctgcaggccgtcccggacgaaataaagatggtcaatgttgcacagccagatccagggaatgtcgccctcctgggtaattcctgtgcttccatcccactgggctttcttccacaggtcataggactcctggagatcattggatttcagtgcctcatccatgtagctgtccaccgtctcattggcataaggggaatactctgccaggccggtgtccttcatggtgtggtaaatattatacagctccatgggggtatgtgctccccagccccacataagggcatccgactgggctctgtcataggcagtatcccagcctacgccttcggtcttcacctggatccccagctcctttaactgattggcgctgtcctctgccagggcctggcgcacagaatcaccgtttgagaacataagagtgagctctgcttttacgccgtccttttcccggatgccgtccttgccctctttccagcctgcctcatccataagtgccttggctgcatccaggtcataggatacattggccgcctcatcgttgtaccagggcattttgtcacatacgctgtaggctgcggttccgtatccgttcagcacattctggatcatctcttctctgtcaatggccagattgatggctcttcttaccagcacatcgcttgtgagggcattgcccacaaccaggccgtccttctcttctggctctgttgccggcagattaaagccccggttatctaccgtagccacacgaagcaggctgtagccttcaatctcctggtcgctgtaggaggctgctgtatgggcaacgtccacctgaccggccatggctgctgccagcgccgcgtcctcctccatgaaaagcacggtgagcttctgaatctgaggagtctctccgtaataatccgggttggcctcaaagatcacctgctgacccttgtcccactgtttcataatatatctgccggagccgatgggattctgtccataattttcgtcataggcatgttccggcacaattcccacaatagccatggtgtatggccagatggaataggcctcattcatatgaaattccacagtggtatcatccactgccacggcttccttaagcatggtgaaatcgttcacggagcttttctccacacagttgttataagtaaaagccacgtccttggcagtgaggggctcaccgtctgtaaatttcacatcatcccggatggtaacggtccaggtaagtccgtcctcgctgcagctataatctgttgccagatccttctctatctccaggtccttggtggttttcaccaaagtactctgaatcagcggttcatggacatgttctcctgccccccagccaaaggcagggtcaaagcctgatgcaggctctgaggtggccggcatggtaaccaccacctggtcttttttctctgtctctgatgcagaagccgtcaccgtgcttcctgccagcattgtcactgccattacggctgtacacataaggcttacaaattttctttttttcatgtgggtttcctctctttgtgtcataaataaaagggagtttgctgcctttcggccgccccctttcgtgttcgttccttgtctgtacattctcttacggcctctgcagcagcctgacaagggagtgtgaatgatggtataccccattccttctgcatctactatataaaaaaaacacccccgccacaagcctgtaggggggttatttttttcattttctttccggttttttgtataaatttctatacaagatattttttgtgaagctcatccagcgccttgggagtgagatacatgcgcttgcgcaggtaccagtccatagtgccgtattccgcctcgatggtatcaaacacattgttcagatagctttccttaacctgaaacaaaatcttaatattctccttcagcttctcatccactgctccttttgcctccagataccggatgagatagtccagctcctccttgagaaatccattggtgcgcataaagtcagacaagatcaccggcctgggcacacccagagcggtgagcagaagggcagttcccacacccacccggtccttccccgcactgcagtgccacagaaccgctccatcctgatggtccagcagacagtcgaaaaattttgcatactgatctgcacagaagggatccagagccagggctttatactgctcctgcatataggcttccccgttctcctggaagttcaggatcatatccataatattttcatccttggtaattcccatggtctcttcgtctaaaattggaagcttaatataacggactccttccatataggtgtccggctttttcctgcgttccgcctctgtgcggaaatcgatcacagtactcaggcggtaatcctcccggaagatcttctggtcctgcctggacacatgatagagctctccgctccttaacaggcgtctgggaagaatattctttccctccttggtgcgcagcgctcccagatctcttgtatttgcaaggctcaccaggggaagccttcctcctctgggatagccaatggccgtgtggggattttcttttcttaaatgctccagacacaccatggcttctggttcagacatttcaaatttatatcttttccctcggcgggtaaccattatgacaaaattttgtacacgataaacaggcttgcctctgtcttcccctgtctgctcgcactctcttctccgataagcccataaaatgtcacaacaaggaagactattgtcgatcatatgctttttaaataccaactgcccgtcctctatggaaattttgccatactgcatacctatctccccttccaaatatatggtgcttcaatgatatcatattttccgtaaatgagaaatagttttctttgttgtttttctatacacttttgtcagaaatctggctgttaccgggggaactgccacaggatccggctgtgcagaggttccgaagcctgtatccttttcttggggtatatggaaaaaggacgccccgcctgtgtggggcatccttttcactgttatttataatcgtccacgtcaaacttccggtctttgaagtaatagtctctatcctcctccgtgatttctcgaaggacccggcagggatttccagccgcgatcacattgtccggaatgtccttggtaaccacactgcctgcaccgatcaccacattatttccaatgtgcacccccgggttcaccacaacctttcccccgatccacacattgtccccgatggtcacttcaattccatattcatagccggaatttctgctgtccgggtgaatgggatgaccagcggtatagatggacacatctggggcaaacatcacattatctccaatggtcaccggacccacatccaggatcaccgtgttaaaattggcatagaaattatctcccacctgaatattttttccataatcacagtgaaagggaggctcgataaacacatttttccctgctttgccaagaatttcccggagcgccttatccagacgttcccattctcctgggtagatctgattaaacccatagaccttttttctggcctccacacgctcttcctccagcccgtccatccaggctttatatggaagtccggccagcatccgttccttttggttcatagtgtcctcctttatttgcctatgcgaagcacaaacgcctcatagggacgcagcttcctgtgttcttttacagttacagtatcatagttggaaatcagaatttccgcatccttagtgaattccgccggcacagcaaaatcctgctcttcctgggaatagctgcacaccaccaggagctgctcctgtcccagcgttctcttgtacacgtacagattctcatcctgggggagcaatagctcatagtccccgtatacaatgatatcatttgtatggcgcagatggatcagctttttataataatggaatacagaatcctcacggcttaactgatcctttgcattgatctctttatagttgggattcaccttgatccagggagttcctgtggtaaatcccgcattttcactgtcatcccattgaactggagttctggcattgtccctgctcttatatcggagatatctcatcatggtgtcatggtcaaaggtccctgcccccaccagctcatgataagcattgatgctctcaatatctctgaaatcctcaagggaatcaaaagacatattggtcattcccagctcttctccctgatacacatagggagttccctgcatcatgtgcagacaggtggccagcatcttggctgacacctcccggaactggctgctgtcattgcccattctggacagcatgcggggctggtcatgattgcaccaataaagactgttccaggcctttccatagagctgggtctgccatttggtcatgacctgcttccactgggagaggggcgctcttttgtcattccatttgaaagtttcccctccgtccaggtccatatgctcgaactggaagaccatgttcagctctctgccctctaagccggcatatttcttggcctcctctatcgttacaccagaacactcgcccacggtgagcagatcatactttgacagcacccgctgattcatctcctggagatattcatggactctggggccgttgcacacataaggggcataatctccataaccgttcacacccacctcaccgtcaggcagtccgggcaccttggagatcatactgatcacgtccatgcggaagccatcgatccccttctcacaccaccagttcatcatatcgaaaacctcgtccctcacctttggattgtcccaattaaggtcaggctgcttctgggaaaaaagatgaagataatacatctgcgtagtttcatcgtatttccatgcagggccggagaagcaggagccccagttgtttggctcttttccatctctgccttctctccagatgtaataatctctgtagggattgtccttagacttacggctctccacaaaccagggatgctcatcagaggtatggttcacaaccagatccattacgatcttaatccccctgtcatgagccgccttcagcatccggtcataatcctccatggttccaaagtccttcatgatccccctgtaattgctgatatcatagccattgtcatcattgggggattcatacactggtgaaagccagatcacatcaatgcccagctcttttaaatagtccatcttctgggtaattccgtttaaatcaccgatcccgtctccgttgctgtcattgaagctcctgggataaatctggtacaccacagactctttccaccattttttctccatttccagttcctccttaaaataatatgatattttttcccttggaatttaaattcgtttgttggttttacgttaaacctattatagcatacttttcttagaatgcaaggttttacgttaaacttttttatttttttccatgacagaatctctctctattaattttacaggaaggcggatgttaccaggcacaggcccgctcttggccagaagtgccattagctgctgcaccgccgtccgtcccttttctcttaccccctggcgcactgtggtgagcctgggataggaaaaacgggccatatccacatcatcgaagcccacaatggacacatcttcaggaatcttcactcccctgtgccttagaaaatccattccctcaatggccaggtagtcactgcagaacaccaaagcagaatagttcttcaaatctctgtaaagcttttcaaaggactcctgctgcttctgaaataaatggcttcccggatacaccaggctgtcatctgcaggtattccctcctctttcagggcccggaaaaaaccctccactcttttctgtcctccgtcttccacctgattctcgttatggtaggggtagtctgccataaaagcaatgcttgtgtgccccttttccaaaagataccgggtggcttcataagcgccctgctcatccatggttcccacattataataaggctcctcctcatgaaaataacagtccgtacatacagcaggcaccttcaccgccttggctactttccggctgttgtctgtacccagactgatggtgagcaccccgtccacgttccaggtagctgtcagcttctggatctcactggcagaattggagaagcacagcatcatataataaccgttttttctgatctccttttccacagcgcccaggatctcagccataaatggggtctgggttccttccagggaagggtctgtgagtacattggcaatgacaccgatgatctttgaccggttccgcaccagcatcctggctcccatattgggcacatacccctggtccttcatgattttttcaattttttccacggttgcaggagataccttctttgtattgccatggatcacattggaaaccgtggtaaaactcacccctgcttccctggcaatatctttgatcgtgaccatatctgctccttctttcttccaaaggttttacgttacaccttaccttcctccactatagcaggtggaggagttttttgtcaatagagcggattctttttcaaaaggggctttacgccattaattttcaggaatataatagactctgttgtgttaaaggagtgaatttatggaaaatctgattttttgtctcaacgccaccatgcctattttctttaccatgattttaggctgcatttttcgacaaaaagggatgtttgacgatgcctttgtcagtaagctgaataaatttgtctttcaggcagctctgcctgccctcttgtttcaggatattgcagggacagattttatagatgcctgggacggaggttttgtgctgttctgcctggtgatcaccatgatcagcatcgggatctccctggggctttcttttttcttaaaggataaaagtgtccagggggaatttatccaggcctcttaccggagcagctccgccatcctgggtattgccttcatacagaatctctacggaaatgcgggaatggcccctctgatgatcattgccagtgtacccttatacaatatctgtgctgtcactgtcctgtctgtgttctgccccggccggggccggctggacagacagctcttcggaaaaaccttaaagggaattgcctccaatcccatcatcctgggtattctggcaggcattgtctggtccttgttaaggcttccccagccggtgatccttcaaaaaaccataggcaatctggcagctcttgccacacccctgggacttctcgccatgggcggctctttttccctgaaaaagggcctgtcccagatcaagccaggaatggtctgtaccttcctgaagcttataggctttgtcacgctgttcctccccctggccatccatctgggctaccggcaggaccgtcttgtggctatcttggtcatgctgggctccgcaaccactgtcacctgcttcattatgtccaaaaatatggggcatgagggaaacctgtccgcctgtgtaattggccttaccacccttttcagcgcttttaccctgaccgggtggctgtatcttctaaaaacctttgcctttatttgaacttgtgattcgaaagaaatttcctgtcatatgaaaaatttctccgctgctgtgagcagataccaggtatccttcacgcccccagtctcatagggggaatgcatggccagctgggccagccccacatccgctgtgggaagggccaccttggtgttggagatgttccccagggtggagccccctgccatgtctgaacggttggtaaaaatctggaacggcaccccggcgtccatgcacaatttcttaaacatagctccggacagggcatctgtacaatatttctgggcggcattgtatttcagcacaatcccctcattcagcctgggccggttcacaggatctgccttttctccatagttgggatggactccatgggcattgtctgcagagatcataaagcctgctgccagcagacgcacatacgtctcgtgggaccagcccagtccctcccggatccttccaaggacatcctccaggaaggtggaggcagcgccctgctttgtggtactgcccacctcttcattatccagcacacagtgaatggccacaaagcgggatttgggcccttttaaaaagcccttcatggaagcaaaggcacactgctggtcatccagacggggactggagaggaactcctgcccttctccccagattgttcccttcatccggttgtacaaatataaatcctggcccagaatatcctcagaagatacctttgcccactgtgcaacctccttcaaaaatctgcctttggcctgttgggtgccaaaaaggggaagcagctccttctgtacattgtaggtatagccctggttcacgtcccggttcatgtgaatggcaagatttgggatcagaagcagatctctgtccacatttaccagatggacctttaagtccccgtcctttcccattgtgaccacccgtcctgccacggacagaggacggtcaaaccaggctgacaggatcattcccccgtatttctccacattcagcttcacataagcaccctctgcctccatctctgggttttctttcacctgaaaggaaggggaatcgctgtggctggccataatgcggatgccctggggggcttccctgggcagagtaaaagcgagaaaggctgagccgttgcgggaggtcatatatctgcctcctggaaccagctgccagggatcctcctcctttagttcctcatatccctctgctgcaaactcctgtctcatattttccacacagtgaaagctggtgggacttttctctataaattccagtaattcttctgctgtctttcgatacatactaacacctcgtttttttgtcatatgaagcattttctcatatttttcccaaggatgcaagggaggggagaacaaagcaggcagcctccccatatatgaacaaagcgggcaagcctacttcaactccccctcccctcactcatgaggggcttggcagctttgtgcgccaatgtgcagctgcaaagcagctttcctttgcacattgtgtgcatcccccggagggtttttattacataggaaagttcagcgaactttcctatgtaataaaaaaaagccctgaagtctatacagcctcagagctttccaatttctttaattttcccagccgccagtaggtgaccgggatcaagggaattaaagccatgatccaggcagcggggtctgccagacagatacccacataccccagacggctgcttaagacccacaccaccccgcatcttgccagaagctcgaacacgcctcccagcatgggaaccagtccgtcccccagcccctgcagagaattgcggtagataaagatcaggctcaggaaaggataaaaccacaccacggtatgaagataacccacgccataggaaatcatctcatcctgggctccgctgacgaaaatatgcatcatggcagggctgagcacatacaccaccacaccggagaaaatgctcagaccgatacacagtcccaccgccgtatttacaccctgacggattcttttgatctttccagcaccaaagttctgtcccacataggttgccatggccgctcccagagccacataggtctgagagaaaatattctgtatttttcctcctgcagagaagcccgcaatataggtaggtcccagcttatttaaggaagcctgcatggtcatagtcccaatggcagtaatggaaaactgcagccccatgggaatgcctatggccaaaagtcttcccgccaggctcatggaaaaagtcagatcctccttttccattttcaaaatttcatatttctttccaatatataagatacataaaagagctgacacaaactgggcgatcaaagttgcataagccgccccggaaacccccatctggaatcctacaataaaagcaaggtccaggataatattcagcactgcagccagaaccagaaagtataagggtgtcttgctgtctcccagggcccgcagcatacctgccagcatattgtaggcaaaggtgatcacgatccctgcaaacagtacacctagataggctctggtctcagagaaaatagaatccggggtattcattaagagcaagattttgtccagtcccagcatgagtcccagggtcatgactaccgcgatacccacacacaggatcacggaaaccccttcgcatttcctcatccccttcagatctcctgccccaaatttctgtgaaataagaaccgaaaaaccgctggtcagtcccatcaccagtccccacaccaaaaagatcacggagctggtggaacccactgccgccagagcatccactccaaggaaccggcccacgatcacggaatccacaacattgtacaattgctgaaatacattacccatgagtaccggccacataaaaccaagtatcaggcgggagggttttcccttcgtcattaagtttgccattttcaatcatcctccttgacacaagttctgattatacgtcctggtccagtatccgtcaaggaaaattttcatagggtattctggcatatctttgtagatttataacagcttctggagcatctccacaaggcttttcatatgaatgggtttggcaagatgaccgttcattccggactcaatggactttttcatatcctcgtcaaaggcattggctgtcatagccacaatgggaactgtcttcacatcctgccttggaagcttccggatacactttgtagcctccagaccgtccatgacaggcatgcggatatccatcaggatcagatcataggtcccttcccgggaatccttcaccttatccacagcagcttgtccgttgtaggcatagtccaccaagaagcctttgttctgtaatatggtccctgcaatctctgcattcagatcattgtcctccacaagaagtaccttttttccggtgaaatccgccgccggcgccttattgtgatccagctcctgtttctcttcccagccggtatccacctggatggtaaaataaaattcgcttccctctccaggacggctggccacctgcagctctccgtccatcatctgcaccagacggctgctgatggccaggcccagtcccgtacctccgtaacggctggaggtattgccgcctgcctgctcaaaggaatggaagatcctggtctggtcctcctgactgatcccgattccgttgtcctttacggaaaaacgcatgcggatgtctgatccatccatcttttcctgtcttatctccagcgtaacccttccctgctccggagtaaattttactgcattccccagcaggttcaccaaaatctggttcagccgcagccggtcaccctgtatccaatcctggaagatctgaaaatccttggtaaatgtgatcttcttctgggcagcctggggattgatcagatcctgaagcccctccagcatggactgaagtgaaaaattctcaatctccagcttcattttgccgctttcaatcctggacatatccagaatgtcgttgataaggcccagcaaatattcagaggagcggctgatcttctccagacactctgtgactctggctggatcctccttttcttccagggcgatctcggtcatgccgattatggcattcataggtgtgcggatctcgtgggacatccgggagaggaaatcacttttcgcacggctggcctgatcatagcgttctttattaatattgttctctatgatcttgacgatttcctgaagatttccctggtcctcctgccacagaggcgcctgttcttctcctgtgaacacagcggccccgctgaattttccattgtcaaacataggcagacacagggcggcccggccctcagccagaaataggaattctctcatggctttgtaggcaggatccttttcacatacctggcttaccgcgcttcccaaacgatccaccaggaaataaaactcctggttatagaaccggtgcaccttgtctgacacccagtcttccttttcctggtgccattgataggatacataggtggtatggaaatcccagttcacctgaatgatctggatatccctggcctggtagtatctgcccagcttcagaaaaagtaccgatatgactgcattgagatccccgcccttgtcaaagaagttcagagtctgggaaaccagattcagctttccggtctgcttcacggacacaatttcattgatccctgtttcatcctcccatttccggttcttccagccattccggttatagaccacataccggttcctgcctgtatccttggcataatccaaggccttgcgcacctgaagaaataaggtatcgtagtcctccaggtgggaagtacgccgggaaattcccgctgacagccggatgctgcaggcctgctccatccacagtctctggagatgttccaccagctcctgataaaaatctatggtgctgctctcctccatctccgggaaccacagcagaaattcatctcctcctgcccgcacagccaccagctctctgtctttcttgttgagctgttctttcagacctaaaatctcacggccgatctcctccagaatggtatctccaaatatcagtccataggtctcatttaacttcctgaaatcatccaagtcaatgagcatcatacagcctttggcatacttcttcatatccctttggatcagcttcctgccttctgactggttgtgaaggcctgtgatcaagtctcttttggagtcctcctcccgctggaattcctgcatcttttgatcatgaatgttacacagactgccgataagcttcgtcttctctcctgcctgatcgcacaccacctttccgttaaggcgcatccaataataaggctcccccggtttttccgccatgcggaattctacatccagggtttccggaaggtccacgaagagctgcttcaccatctgcctgtcctcctggtggatcagctcttcattaatacaggcggaccggccactgtctgcactggtcaaaagtgtattgtctttgtccagatttataagctccacgttacggttgacaatatcataggtaaagaaaatatccgtactgctctggagggcgatccaataacgttccttctcttcctttaagtcctgctccgcatttctctgcttttgtgtcaatgctgccagctcatcgtagagattatcgatctccgcaatattggaatggctgaaattttccagcttctccgcagaactgtcctgaatacactgtgccagcttccgaatgggtttggtcacgtgacggaccaccatatacatgaatacaattccaaaagcaagtcccaccaaaatagaatacaccatcatcctgcggatctgcttctccataccgaagataaagcttccgttctggaccccgcctaaggcccacacctgatcctcaaaaggcgtattacggttatatagctttaaggtgctcaccgatacataggtgtttttggtccggtcccgtttctctccccattgatacagctggtcatactctgtcctggtactggagatggtatccttaagcgccatcctttggggaagcactccccgagaaaccatgggctcccaggtaaggccgctgctgtctgtcaaaaagagcagatagccgcccccgtcttttcccacattcacctctgactcaggcagaagctccaggagataatttgtagaaacctcgatccccagcacaccatagggctgaccttgaaacaccaaaggcacgctgtaggagatcatctgatgggaatcatttctgtcatttccctccagacagaagggtctgctccagtatcccagatttctgtaggccgtattggggtagtggaaagcctgtaaatatggtttatagaaaaaatcatctgcagccagagtctctgcctcctggaaatgaaatctggagctccacaaagaatccagggcaatggccttttcctgagaaatctctctgcttcctctttccataaggatatccgaataatctcttgggttgctggagggatccgaatcccggaaataaattcccacacagtccttttgggtgccagccattccgtttcccactatgacataagcgccggatacctgattaccgcgcacaatattcaaacattcatccgcagcttccttggcaaactttccctgcagatcctcgtttttgagaaattcttcaatggttacattctcatccagcagaagtgtatccaacacatctgtgacccattccacactgctgtctacctctgcccaggtttgattcatactattttccagcagattctttctgttttccaccgttctttccagaagatttacagcatactgatccaagagcgtagttgtccctgtcatccacaaggtaccaaaagagatcataccctggataaccataattcctataagaggcattaatacgatccttaaaattgttttcttctttaatctgctttccttttccatatccgactgtttttttatccttccattgcctgcagcagctgctccttcaaattgtcataccagctttcaaaagcggtgtcatcaatgtagggctgggaggcttcctctaaggtctttcctttctccagctcctgcatcaccttctcacggtctgccttagccagctccgtaaggctgttgtccaatacctttcttgcatcgctgccgccgtcaaaggccttgttggtataaaatttcttctcttcctggttttcaataaacaggctgagggtatccctggtctttggtgaaacttccagattgttttcctcaaccaccttatcgatcaaatcccagctcatggcttcttttttcaccgggagatagccggatgcgcatacaaagcgcacattattttctgcctgggtaaaccatttcaagaaggtaacagaggcatattcttctttctcattggtctttgtgactaccataccagcaccctgctgtatctggtaagcctccccgccttccagtacaggagcaggaagcaccgcataatccacagggtaactctcctcctcgctgatctccaccgtatcaggaaaatacatagaggaggtggcagacccggtaaaggccagaagctcgccaatcttcacatcatcggaacggaattttccgaatgccccataatagcccttcacaaatggcacataatagctgtcccagatttttttcataacggttttatctaaatccagggttccttttccttcgctcacctggaaaatctcatgaccgaactgcttggaggcgatcacgaaaaaatttgcatcggaatctcttccatagaacgcctttccatcctcagggatatccggggtgagagcatcgctccactcatagtattcctgagataccttagccactccctccatggtttccagctcttccaatgtggcgccggtatcctgggcaaacttatcccagtcggttttattcaccatcatgatctcagaagatttggctgtggggaaaatacgcagctctcccttaagaccgattcttccctcctcaatataggaatccatatattcctcaaattcctcatcgcttatgtactcagacagatccgccagcttgcccattttctcaaattcataggcggtatctgcataggaagagaacacattgggcacctcctgggcatctgcatctccccgcatagccgaacgggcattttcctccagctgggtgaccgaaccctggctgtgagcagttacatagattcccttctccttacccagcgtgctgttaaattcctttaccaggtcgtcgaaggcgatctgctgggcgccattataataatgccagatgctgatctccgtaggttcatctgggtccaatccatatggatccttctggctgccgcaccccagcagctgggtgagtaaacaaacactgccaatgataacgattcctgtctttttcatacctgtctccctgccccctgtatattttttatcaattaccctattatatcatagattctttatatttcaaacgaaagtataaaactggactgaaatagaaaaaaggcgtccaaaaaatttcgaacgcctttcttgttctatgaaattaaatgactgaggacccgaagggcatcagcgccagctttgccagcttaaactgctgcattccaaaggggattccaatgatggtacagcataaaaccacaccgatcaccgcatgctccagggcaaggggtactccagacaggatcagccagaaaatattcaaaagcagtgaccctgctcctccgccgtaacggacttctttcccaaagggaaaaaagcttaaggaagcaaatttaaagcactgcatcccaatgggtatccccacaatggtaatgcaccacagacagcctgccagacaccagctaagccctgtaataaaacctccaaagataaaccaaagtaaatttccaagacatcccatactcattcacctccctgtctgttttccagaaacgccggcattgttctcagatcctgcagaatttgtctcacacgggaaatggcatcctccacctgggacctggcatctgagattttggactgcaccagccagtctgccaccacaccgtcaaaaaagaaatccgcaaatgtcaaaaaagaaccaatctccatatgaaactctgtaggcacctgcacatcccgcagctcccgctggaaggcctgcagatattccttggcctgctccatctctctgatcccgtcattcatcctggaatgcttcatcattccagtgaaaaagtttcctccaaacaaatcccacagtccccagttcttggcactgtccagggatctcttggctttctccaggctgtacagggctttttctcctgccacaaccgcctcgttaatttcctgatacattgatttctgattcataattttctcctttcttttgcacctcttttggctgcagccgttggggacattctatgaattatgtataaaaaaagacccctattatgactgctgccacaataaaagtcttgcacatctcatttgatacggataccatctcggtatcgggtgacggtttcaaacccacctttcggtgttcggctactccctttcatttgcgtaacaataatgtaccatacttaggcaaaaaagtcaagataggcactccaaagttttaagaattttaacaattctattttcctgatttatgctataattgttttaaataaatcagtcaagaggaggaccaccatgatacatactctggaaaataactacttaaaaatctctgtaaacgatgcaggcgctgagctttccagcattttctccaaatcagacgggcgggaagtgctgtggcaggctgatcctgcttactggaaacgccacgctcctattctatttcccaacgtgggcaaaaattatggaaaccattttctgtacaagggtaaggaatatcccaccagccagcatggctttgccagggacagtgcctttgtgtgtacaatgaagacacagacttccatcacacacagcctgacctccacagaagaaactctggagaaatatcccttccccttcctgctggaggtgacccacacccttatagacaatactgtgaaggtctcctggcatgtgaaaaatacaggcactgacaccatgtacttcaccatcggcggccatcctgccttccaggttcccattctcacaggcacccatcaggaagagtattatctgcagtttcacaccgatcatctagaatacattcttctggaccttgacaccggcaccgcctgcccggataaaacccaggagctggcccttgacaatggcttctgtcccattgaaaaagacatgttcgccaaagatgcactgatttttgaccaccagatcacctgggctgccatcacctatccagataagcagccttatatctccctgtcctgcccggattttccaaacttcggaatctgggccgcaccaaaagctccctttgtatgtctggaaccctgggacggccgctgtgataattatggcttccaggaggatatttccagaaaacccgggatcctgtccctggacaaggataaggattatcacaaatcctacgagatcaccgtccatgaacatagggaataaaaacaggaaaccccattggcaaagagccctcccaaaaaccggagggctcttccttggctttcccaggctttctggctgttctattcctgtacctaagggcaatgcgctcttgtgtcctcatccagaaactcccggatctcttccaggattttatctcccttaaaatactcttttccataatccagattaaaatcataatcaaaatcttccggattttttccctggttatgctggataatggtttctgctttgtccagggcctttaccaaatgggcctcccttgtggaattctggtcatactccatccagatgtcaagaagcttttcctccagggctggaggaagaatggaaaaaagcttttttacatcccgcagctcttctgcatgcttcactgcttcatccggctttaatgcagcagagatatccccttcatacagctctcccagatcatggatcagacacatgagaaaaaccttctccctgtccaggtccggatattgatccagcagcacgccggcaaatagggccagtctccaggaatgctctggcgtgctttcctttctgccctgggcagaccaggcggttctggtgacacttttgagaccctcagcctccctgacaaatgccaggattttctttaaatcaccaaccatatttccttatccttacttattgaatatctttaaaatggaactgctttttgcctccagcatagtctcccacaatctgtccctggccaaaaagcttatacttataggttaccaggccttccaggcccaccgggcccctggcatgaatttttcctgtgctgatgcccacctcggccccgaagccataacggaaaccgtctgcgaaacgggtggagcagttctgataaacgcctgcggaatcaaccatctgcataaaatactgggccgtcttttcattttctgtgataatacagtctgtgtgatgagagccgtattgattaatgtgggccactgcctcctctacatcttccaccagctttacagacaggatcaaatccaaatattctgtgttgaactcctcttcctccatgacctggcaggggatgatctctgcagcttctctggttccccggagctttacctgattctcatccaggctctttttcagcaccggaaggaactgggccgcaaccgcgcggttcaccagcagagtttccacggcattgcaggcggcagtatactgggtcttggcatccacaaggatgggcaccgccttctcaatatcataatccttatctacataaatgtggcacacaccgtccgcatggcccattacaggaattttcgtgttgttcataatgtactggacaaaggaattggagcctctgggaatgagaagatccacatccttatagcaggacagaagttcatcaatctcattgtgctgttctgcctgaagcatacagcccttgggcattccggcttccagagccgcctgataaataatggaaaaaagcacccggttggtcctggcagtctccttacctccctttagaatggcacagtttccgctttttaagcacagggaagaaatctgtaccagggcatccggccgggcctcgaaaataatgccgatcaccccaatgggacagctcacccggtacagcgtcagcccctcatccagctcccgggcaagctgcacctttgccagcgggtcaggaagggcgatgagctgttggatgccgctgatcacatcctggagttttccttcatcaaatttcaagcgttttctcactgcctgggggacctgtgcctgggccgctgcctccatatcctcttcattggcagcgaaaatctccttctcatgttccttcaaagcccgggcagctctggcaagggcttcatttctttgactgagggtggttgctgccagcttgggagcatccagcttcattttctgtgcttcttctctgatattcatataaattcccactttctttgtgataatctttctttgttctgaattttaggatgtgtctattataataggaaattctcctacttacaagaacttccgtagattttcctggccgctttctttttatagattccctgccccgccagcctgtggcattaaatttttctgcctacacactttttgacaatcagttgttggaaatattgaagtttttatgaaaattttcttttcacttcagggcaataatgatataataactgtataaaagtaaaatccctgcagggatccgtcctattaagaaaacagcaggaactctgttatggcaaaggaggtcgttctatggaatctaagatgtttaaaatctatgcccgggaagatgacaaaattcaattaaaaatttacccaggacattttgccacccctcaatcccatatcacccattttctggacatgaccactatgaaggcacggtgctcggaagcccagcacatcgcccagacactggcaaaaaattatgccgccagcacccccattgataccattgtgtgcatggacggtctggaggtggtgggcgcctatttggcagaggagcttaccaatgccggcgttctctccttgaatgctcatcagaccatttatatcacctcaccggaatacaatagtgtgggacagatgatcttccgggacaacatccagatgatgatcaatgggaaaaacattctcctgctcaatggctccgtcaccactggagagaccttaaaaagagccattgaaagcattgtgtactacggaggcaaaattcaggggatcgctgctattttcagcgccgtgagcaaggtggcccagatgcccgtgcacgccatctttgatcagcgggatatccccgactacgggacctacaagatgaccgaatgccccctatgtaaacggaaacaaaaaatcgatgccattgtaaacagctacggttattccaagctatagcaaaagtaaggcctgctgtcagcacacagcagcaaaaaagtatctcctgcaaaaccaggcgctccttacagggaacgccttttttattacataggaaagttcgttgaactttcctatgtaataaaaaccctccgggggatgcacacaatgtgccagggaaagctgcttcgcagctgcacattggcgcacaaagctaccaagcccctcatgagtgaggggatggggagttgaagcgggcttgtccgctttgttctgccaagggcacagcgggcagtcccgcgtcaactcccatcccttcacccataaagggcttggcaccttgtgtgatccagcttcacacaattcttaatttccctgtcttcctccaaaagcccagtgaaatacagcattctgttgaaatggacagataatagtaacgaaatttttacaaattatgactggactatttcaaggttttgtgagagaatacacctaggttgttgttagtcttttaacaacaaaataagtcaatcttatacttgaaaggagttttaaaatgatttattcacacgaagtagaaaacatgtgtccagtagcgcagggcgtagctcacggcgcagctccgatcccagaagaagcaaattgggtaaaagcaaaagaagttaaggatatctccggcctgactcatggtgtaggctggtgtgcaccacagcagggtgcctgcaaattaaccttaaatgtaaaagaaggcgttatccaggaggccctggttgaaactttaggatgttccggtatgactcactctgcagccatggcttctgagatccttcctggaagaaccattctggaagctctgaacacagaccttgtatgcgatgctatcaacaccgctatgagagagctgttccttcagatcgtatatggccgtactcagagtgccttttctgaagacggacttcccatcggcgctggtcttgaggaccttggaaaaggccttcgttcccaggttggcaccatgtacggaactctgaaaaaaggacctcgttatttggaaatggcagaaggctatgtaaccggtattgctcttgatgaagaagactgcatcattggttatcagtatgtgaactttggtaaaatgatggaattcatcaaaggcggcgatgatgccaacaccgcactggaaaaagccaaaggacagtatggccgcgtggcagatgctgctaagattatcgacccccgtaaggcttgatggaatacatagagttgtgcgattaaccaatcaattaggaggaaaagaagaatggctttatttgaatcatatgaaagaagaattgataaaattaactcagttttaaacagctatggaatttcttccattgaagaagctgagaaaattacaaaagatgctggtttagacgtatacaaccaggtaaaaggcattcagcccatctgttttgaaaatgcatgctgggcttacattgtaggcgctgccatcgcaatgaaaaaagactgcagacgtgccgctgacgcagccgctgccatcggagaaggccttcaggctttctgtattccaggttctgttgcagaccagcgtaaagtaggtctgggccatggaaatctgggcaaaatgcttctggaagaagaaaccgactgcttctgcttcctggcaggacatgagtccttcgcagcagcagaaggcgccatcggtattgccgagaaagccaacaaagtacgtcagaaacctctgcgtgtcatcctgaacggtcttggaaaagacgctgctcagatcattgcacgtatcaacggctttacttatgtggaaaccgattatgattataccaccggagaattaaaagaagtattccgcaaatcctactccgaaggaccacgtgcaaaggtaaactgctacggtgccaacgatgtgcgtgaaggtgttgccatcatgtggaaagagggcgtagacgtttccatcaccggaaactccaccaaccccaccagattccagcatccagttgccggaacctacaaaaaagaatgcatcgaagccggaaagaagtatttctccgttgcctccggcggcggtaccggacgtaccctgcatccagacaacatggcagcaggtcctgcttcctacggtatgaccgataccctgggacgtatgcactctgacgctcagttcgcaggctcctcctccgtaccggctcacgtagaaatgatgggtctgatcggcgcaggaaacaaccccatggttggtatgacagttgctgttgcagttgccattgaggaagctgccaaagctggaaaattctaataaaatttccatatctagatcgtattttaagaccgcactgaccattcctggtttgtgcggtttttaaacggcaattttagagaaaatgccacctatctttctagtgaaaatcctgaaaaactatgttatactacctttaaaactaaggtctgtgcagcatataagactttaaacaaggagctataaagaaatggacattcaggatatacttatattgatcatggaattgatcggcaccgtggcttttgcctcctcaggggccatggtagctttggaaagaaatatggatatcttcgggatcagtgtcctgggtgtggtcactgcctgcggaggcggcttgatccgggatctgatcctgggcatcatccctcccggggtgttcaccaatgctatctatgcctctgtggcaaccattacctcctgcctggtattccttctcttctatctgaagaaggagcttttggagggacgattccgggtgacctttgacaaggtgatgctggtaatggacagcatcggcctggggatcttcactgtggtgggagtcaatacaggaatccgccacggttttggagacaatacctttctgctggtatttgtgggcaccatcaccggagtgggcggaggacttctccgtgacatgatggcaggggttcccccttatatttttgtccgccacatctatgcctgtgcctccattgttggggccctgtcctgtgtacttttaagaagaaccttcggtgccgtggaagccatggctggcgcctgtgccattgtcatactcatccggtatctggctgcccacaatcactggaacctgccccgccttcagctggaaaaacggccctgaaggcagggctttttaaaactccattttttcaataatcttctccgtgatcctataggacaggggaagaagcagcagggaaagaaggaaaattcctgcttccaagaccaaaacaaggtttccggtgggcgcaacaggaaattttatcaccacatcacttgccacaaggaccactgccggcacaacagaaacagccaacagaataaatctgccttgttcccctccatatttcaaggtgacgggaactgcaaaatccatataaagaatgcagtagcctgtacaggcagccgccagaaaaatatatccctcaagaccctgcttattgatcacaagaatgagtattcccacaaggagacaaaataagttttctgcaaaaatgtaccccaccagcatctgataaagggatacggtcatctgctttctgctcaccggaagagcacataagtagccaaaccccggcaattgatttcctacaaccaaggaaaacacaaaggtcactgaaaaaatcgctcccattaaaaccaaaagatatacggatcttaatactgcagaaaatactccaaataacagcatacttgtgataaatccttttatttgagaacgtatcatataatagtccttcagatataaccccttcatctctactcctccctgcgtgcaaatgctctgtcagtaagtataccggagatcacgtatatgaccaaagccccggcaacgatcaagaacaaaaagctattctggacagtaacctctccatctgccagtcccaatgaccgtgaaaatgcaaacaacatgaaaaatccaactgccaaaagcatcatacccacgatcattacaattcttgcagtattcactcccttaagaaagagcactggcagcatcactgccattaaaataatattaagtgccaacataaacccaaaactaaatacagcatcctctatactctcatgatctaacagagcaaccagaaacgaaatgatccctgcaaatacatgataaatgaaataaaaacccagggaaaaaacatatttttccaacaccagctgtgtcctgctcacaggaagctgcagcagaaatccccttcccccctgctcttctcccccaaagataagaaaaagcagattggtggagataacaattcccatcattgtcatataggtggaactattcatgacaaaagacatgagaatgataaaaccaaacagaaaaataaaatacttcctccccaagcttctgacactataccaatccttcaaatataatcctctcattcttcattcgcccccttgatcaaaaagagaatgatctcctccacacttggtctggtaaacaccgtgttggacagcctgggctttaactcctgaggtctgtccaccagcacctcatattcaaactggcttgcgcgcaccccttttacatattccttaggaatatccaggaactgctggggggaacagtgaatgagtccatatgtctggagcagatcatccttgctttccataaaccacagctttcccctatgaaggaaagcaatgtaatcagcagctctctccagatccgtgataatgtgggtagacaccagaaccgtatgatcttcatcctggataaagtccagcaaaatgtccagaaactggtctctcaccacaggatccaggccgctggtggcctcgtccaggatcagcaggtctgcatggtgggaaagggcgatggccaggttcagcttcatcccggttcctttggaataatccttgatcttcttctttggttcaatactaaattttctcaaataatcttcatagagctccttatcccactggctgtaaatgtaagacatcatcttgcccacttccagagcattcacggtagaaagaaaacccaggccgttcatcaccacccccacctggtccttccacttggctgcccgctgtgtctggtcctgtccgttcacatagatctctccctcatccggccggatcatatccaggatcgccttcaaaagcgtggtcttaccggccccgttctctcccaccaggcccacaatgcagcccttaggaatatccagcgtgatcccatccagcgtaaagccctcatatttctttgtcacatttttcatacgaattgctgattccataacctctcctcctattcttcatacagcatggcaagcatttctgttaactgctcaagggaaatgtccccttgtttcgctttttcaatggctttctcaaaaagctcttcaattccccggagaagatcctccttgagaagctccatattggccgcagccacgtagctgcccttccccaccacggtgtagataaacccttcccgttccagctcctcataggcccgcttggtggtgatcacgctgatgcgcagctccttagccaaaaaccgcatggaaggcagggcatccccaggctttaattctccggtgaggatcatctgcttgatctgagctgtaatctgctcataaataggttttcctcctgcattgtcaataataatattcatatggcattcacctttttcatattgtatatatataatatatacactcatacacggtttgtcaatagtgtggtcaattttttttgattttttataggacatatgctacaatcctagtaaaacgaaaggaactcatgtgctgaggcagacatcccttgctgcacatagaaaaggagaaaatttatgacagaaggaaccatgcagtatcctccatccatatttccaagaaaaatgcagatattaagtggaagcgccctaaaggtattggctatggtcattatggccattgaccacaccgggctgatcattctcaggtattgggctcctgcttttgacccctatttttacattggggacactcccatcgggctgtaccggatcttccgggacgtgggacgggtggcttttcctattttttgttttttgctggtggagggctttctccatacctcgaaccggttccgctacggcaggaacttatttctgtttgctttcatttctgagattccctttaatttcatttataccaatacttggaaggatccggagcatcagaatgtatttttcaccttatttttcggatacctggctctgtgggcctgggaatatttccgggaaaagccggtccttcagattctgtgcctggcaggacttttcgtagtctcctatttggggaagtcggattatgactggagaggttatggactgatcctgattttgtattttctccggtattataaatggccacaggccattgccgcctcctgctggctttactttgaatggaaggcatgctttgcctttatctccataaatatgtacaatggaaccaggggatttataaagggaaaatggtcaaagtacattttctatgtattttatcctctgcacattgttttgctggtgatcctccggtattaccttttccttcggccatagaaaatcaacagggaatctttttcttcctgaaaatttccataacaaaaggcaggagtgctttctcctaggacttccaagacagcaagctttcaaatgatccttgtctgccggaagtgtccataagagaaatgcactcctgccctattttttgtgatgaaattcctaagatcctgcggtcaaaaaccccagtgctcccctactgctttttcacaatctcgtttttgtttttgtaaatactgttcccgggaatacagcctctcactggggagagggggtaaatattggtgttgcggccaatgacggttcctggattcagtacagatccacagccaacctccacatgatcccccagcatggccccgaacttcttaaggcctgtctcagcctgctcctgatctccctttacgatcaccagctttttgtcggattttacattggaacagatggagccggcacccatatgggccttgtagcctaatacagaatcccctacataattataatgaggaacctgaaccttgttaaacagaacgacatttttcaattctgtggaattgcccacaaccgctccctctcccacaatggcctttcctctgataaaggcacagtggcggacctcagcatcctttccgatgatacaggggccgttgatgcaggctgtgggggctaccttggctgtcttagcgatccagatgtccccttcccggtactcatattcttctgggttcagtgtcttgcccagctttataataaaatctccgatctcaggcaggacctcccaggggtaggtctttccctgaaacagctctgctgcaatggtttccttcaaatccagcaaattggaaatggtataatttttcataattccgttcctcctcattcttacacacaacctgtcattctttttccttggacgaagctttcttctgggtgggttttttctcataaaaagccgccgcctgatcaaaaaactggcgaagggctccctgatatctggtgcccagcaccgcactggtgcgtacccggataaaatgctccagcttatccatatattcctgaggggtaatgctcccctccgccacataggtcagccccttctcccagcttgcggtcagctccggattgagcagggagcggatggaacagttcaccacatcgaaaatcatctctcctaaaagagtgggggtgaccacctgggtctttttattcagactcaaatactgaatatagatcagctttttcagaatttctgccctggtggcacttgtgccaattccactgcccttgatctgggcccgcagctcctcgtcctcaatgagctgtccggcattttccatagccaggatcatggatccggaattgtaccgtttgggaggtgaagtctctccctccttgatggacagctcatctattgggagtatagcacccttttttaatgtatgcaatgcctccagaaacgcctggtcacaggtcatctcctcctccccctcgccggagtcctctttttttgcctgactgcttctggcaaaggagttggatgcaatcttttgatacccctcagacagaagtaccttaaaggtggagaaaaaagcttcctccttccttttcgtcaccacggaaaccttctggtaaactgcaggagggtagaaaatacacagaaatctcctgacaatggtctcatacaccctctgggcagttagagacaggctttgaagggtgcccagtccctggccggtgggaatgatggcataatggtctgtgatctgcttatcgttcacatacctggtcttggccagattcttatagctgcccatctcaaaaatttcagccacagcctgggccccgtggggataggccttcaggccggacaaattcttgctgatcaccttggctacggcggtggagagaactctggcgtccgtccttggataggtgaccaatttcttctcatacagctcctgggtgatacgcagggtctcatccgggctgatcttaaacagcttggagcacacgttctgaagctctgccaggttaaaaagcagaggaggattcttattttccttcttgcgctccaccttttccaccatgcattccaggggcaggggcacacggaggtaatctataagctcctgggcccgttccttttccttaaatccgttctctttatataaatacggagactgaaaatagttgctgccctcacaggccctccactctccgtcaaatgttttcccatttaaattaatcctactgataattctgtaaaatggagttttcacgaaagcacggatctctctttcccggcgcaccaccatgcccagcacgcaggtcatgacgcggcccacagcaatggactgatacttgctgtgctggtaattggaaatctgatttccgtattttaatgtgagaagacgtgaaaaattaatgcccatgagataatcttccttagcccgcagataagcggaggaagccagattgtcataggcggacagatccttggcctcccggattcccctaagaatttcctcttccgtctgggagtcgatccatactcgtttttgctgttttccctggacctttgcctcctgggccaccaggcggtaaatatattctccctcccgcccggagtctgtgcacacataaatggtatccacatccggccggttcagaagtccggcaacgatctgaaactgcttttttacatcagggatgatctcatacttaaattcgcgcggtaaaaaaggcagggtatcaagactccaccttttgtatttgatatcatatttttcagggtagctcatggttaccaggtgccccacacaccaggtaaccacagcctgctccgattccagataaccgtccctgcgctgcccgttgatcttgagagcctttgcaaactcctgggcaacgctgggcttctctgcaatatataatgcttttgccattacttatctgcactcatctttctcagaggcaatgccagcaatagggcgccgcctgccatatttcccaaggtgaccaccagcatacttttcagcatggctccaatggaaagtcccggtaccagacaatatgcggtgataaaaatgctcatgttggcaatggagtgctcaaatccgctgatcacaaatcctgcgatacagaaaatgatcatgatgatcttggcagtctcttctttcagcttgattccgcacagtacggcaagacagacgaagaaattacacataactgcccggaagaacatctctcccacgggaatggtaagcttgttgttaataaagcctgcaaaatagtcctttgttcctgctgctcctgcccccacaaagatcagggataagatcagacagcccacaaagttacctatgtagctcaccagccataccttgccggtctccccccaggtcactttcttgtcaaaagcaccgaaggccataaccaggttgttgccagtgaacagctctccgcctaccagcacaatgagaagcacggcgatggcgaagccgatggagcctaaagcctttccccattcgggcattgtcttggaaaatacatttcccgtaacattgcagaagatcattgccagaacaataaagaagccggccataatggctttaataaaatacttcccaaaatgttcgttcagcagggtgatcttcccttttgcagcatttgatagtttctgcacatcctcttgattcatagaatccctccttaaataagctataggggtattataccattttgacaaaaattccacaatatattattttctttagacaaattttatcttttttcactttttttatccgttttatccgtttctctttaatcttttgttgcattctgcgcagcttcccaggaaccatacagattccccctgtggcctctcacaaaccccagcatgacaactccatgcctctgagccagctttaccgcctctgtggtcaccgctgccctggaaaccaccatagggatccctccccggatgatcttgcccagataatccccggagattctgccgcttgtataaatgacgcactgctccaggggaaggcggtgcttcatggcaaaccccagcaccttatcaagagcgttgtggcggccgatgtcctcaaaggtacacgctatagcaccgtccagcaccagagagcagctatgggcacagccagtggctgcaaagagctcccccggcttttcaaaaatttcatctgccagttcaaataccttttgtgcatcccaatggaatgcaggtatgtttccagttatctgtgcatgggcctcttttttcccggagtcctctggctcttccttcagagtcacctgtatctcaccatccagtacagagattttcatcttctccagctgctctgggctgtggagataattcctggtaaaaagactgcccaggactaattcctccagattctccggggtacagctcaggaaaaagccctgctttgcgttcaccttcacgtgaagcagcatctctgccgctacatcgtcctgctggtgagatctattttcttccttcagctttaggatctcgattttctctttattcatataaaaacctttcttgtgaccatacatgccgggagttgaaaaaaatcttcccgtctgttataatgatcaggtgagatcaaatggcgccgcagaatttcttcacgttcttggcagccacctcttctatgggcgtcgatgggtagctggtgtaccccctggtcttcaaaacctgtgtagggcgttaacagcgtcctgggtaagttcgattcttacaggcgcccgccaataaagtaaaaaaatatttgttttctctttcactcaatcccagactttttccatttccgccacaatctcatccagatccgtttcctccaaggtccgcatatccagccataccctgtcctctttaatataaccgatcacaggaacaggaagtgtgcgcagctttcttagaaggtcttcgcaggtcctttcatctggttttaaggtgacggcaaagcttgggatctccctggccggcagtgcgcctccacccatcatacaaacgctggcctggctttggcaggttcccggaaagcctctcacccgcagcttcaggcacatctgtcccgcacatttttccagagactccaggggcttgcgaagcattttgaatatagggatgtttgcggccgcccgcttctcatccaaatactcccagaaggtggctgccagggctgccagggtgcatttatccggacgcagggcccgtatgagagggtgttcctccatcctctgaatatattcccgcctgcctgccaaaatccccgcctgggggcctcccagaagcttatccccggagaagcacaccacatctgcccctttggacagaacctcctgcaccgtgggctcatgggtcaggccgaaggagtctaaattcataagacagccactgccaagatccgccaacagaggaattcccttctcctttgacaaatgagaaagctcctccacagaaacctcctgggtaaatccgataatcctgtagttgctggtgtgaaccttcagaagagccccagtgtcttctccagctgcctcctcgtaatcggagattctggtgcggttggtggtgcccacctcccgcaggatggcaccgctctgctccataacctccggaatgcggaaacggccgccgatctccacctgctctcctctggacaccagaacctcccggcctttggcaagggcgctgagcataagcagcactgctgccgcattgttgttcaccaccagggcatcctctgctcccgtaacctttttgatcagctccctgcagtggtcctgacgggatccccgcttccctgtctgaagatcaaactccagattggaatacccctccagggcgctaagggctccttgtacctggctttggcccatgggggctcttcccagattggtgtgaagaaggatcccggtggcattgtacaccctgcgaaggggcggctccacagcctgggacgccttcaggacaatttcccggatcaggctgtcaaaagcctgcctgatctcctcttccctgcaggtacggatattctcacgcaaggcctccagttttttccgaatgatctccaccaccggcccttttccatagcgctcacatatcctttgaatctctttctcctccaaaagtgaatctactttcggaatttttctgtaatactcttttttatccataattacccactcttactgaaatataagaaccgattcctgtttttctgtgacaactccgatggctgcgctgggctggtccagacaggccagggcttccatggctttctcactgtcttcaggatgcactgccaagagcagtccccctgatgtctgagggtcaaataccacatcctgcataaattcctccacattctggaagaaaacatctctctgggtatattcccggttccggtaagcaccagagggcacaagccccatctgggcatactgggcgacgcctggaagaagcatcagccttttcgtgttgatcaccagtgtcttatcacttccccggcccatctcacaggcgtgccctgccaggccgaagccggtgatatctgtacatgcatggatccgaagcgctaccacagcctcacttgcatatttgttcagacaggccatggccgccacggctgaggcagtctcttcctcagaggcaagctctgcctttatggccgttgtcaaaataccgctccccaagggtttggtgaggatcagcacatctccggctctggcgccttgatttttccatatcttatctggatggacaagaccggtgacacacagaccgtattttggctcctcgtccacaatggtatggcctcccgccagaacggctccggcctcctgcaccttctctgcgcctcctctgaggatctctcccaggatttccggggagaggcagcctggaaaggcggcaatattcagggccagtctgggggttcctcccatggcgtacacatcgctgagtgcattggccgcagcgatctgcccgaaggtataggggtcatccaccactggcgtgaagaaatccacggtctggatcatcgccagatctgaagaaagctgataaaccgccgcatcgtcacaagtatctgttcccaccagcagcatgggatcatgaaattttggcagcttgcccaaaacttgggcaagggtcccaggacctacttttgccgctcacccagatgtactggaaagctgagtgagacgtatctttttctcctgttcttccatggggacacctcctatccttccggcctgggatccttgaggatcctcccgccctctactttctttgtaaaaccatttttatcaaaatgctccagcagggcaaccgccacctttctggagcagcccagacaatctctgtacgctcccaggaccaccaccggctcccggtccgccatctcctgaaaaaccaacctggcctgttcataatagctgtggtggatgcagtactggtcatccaaacgtatcaatactttcttattcagcagagaggtgaaaattgcccggaattttttctggcggcaatgctccttagcataaacctctgtggcaaggggagcaaatccggcagttttataatcttcctcaatctcccaaagaattgcactctcgtcctcccggaccaccaccttaaaccgatatttgctcaccagctggttttcttccttgatgacctttgcctctttgagaaggcccagcacagcatctgccgtaccctggtccatataaggctgcagccggcttctcacctccggaagtgccattccttccttcagggggaattccttatgaaattcatccagaattttcgtcactttctcctggtaataagtaaattcttccatgtgaagatatttgtcatttcccaaataaaccagttttttttcttcacacagctttttcccgttatttttcagctgggagggattcagggcccacctggctccaatctcctccaaggtaagatgacggccccagtgttctttcaccgccagctccagctgttccttctcgctgcccttctcttttatggaaaagccctccaggacctttgcatcccggcgtttatgtttctttggacaggcatccagaatgatgccgccccccactgtttccaccggtgaatagaaacgaacgacgaaatggtcacctcttttggccacagtaacctcctccagcctaagctgggcatatccctcttctcctgccttcagctcctgggcatccaataggatcactttccccagaagctctctggttccatggtaaatatggactctgcttccgttttttactgtgtgggaggtatgttttagcagctccagcctcacatccagcattctggtgggaaaaaggcttcccctggcggccagcacgtctcctctagaaatctcctccttcttcctgctgggaatattcacagccacacgctgtcccggccaggccttgtctgcattttgggaatgaacctgaagatttctcactttcacgggaatttcccggggatagagaactgcctcctggtccttcttcaggcatccctctgacagagtaccagtgacaacggtgccaaagcccttcatggaaaaaatccggtcaatgggaagtcggaatttccccctctctccccggtcaggcatggaatcacacagctcctttaaaactgctttcagctcctttaatcccttctgctcatagacagacactggaagcaccggcgcattttccagaaaagttcccaaggtcagctcccggatatcctctttcacaaggtccaccagctcgggctctgccagatcagttttggtaatcaccacagcgcccctggagattcccagaatggacagaatatccagatgctccacggtctggggcataaccccctcgtcagcagacactaccagcatagccagatccatgccccccgcccctgccagcatatttttcacaaatttctcatgtcctggcacatccacgattcccacccgggtaccgtcagaaaaatccaaataggcaaatcccagttcaatggtgatgccccgcttcttctcctccttaagcctgtccgtgtcaattcctgtgagggccttgatcaggcaggtctttccgtggtccacatggcccgctgtgccaataatcatatgcttcataacgtcactccgctccggatgggtatgctccggaatttaaatttttaactgtctttcttcccttctattttagcacacctgcctggaagaatcttctacattttactgaaaatgaatggtcacagaacagatctccgacttggtgcccacccgcatattgggtccaaacaggcccaccccggaggtgacaatgttgtgcatctgatccttcttcaggtatccgcaggaattctcccacagaaagctggtgacaatatttccagggaacatctggccgtcatgggtatggccgcacaggtccacatctactcccgcatccgccagctcctgaagctgtctgggctcatggtccagaaccaagatgggttttgtgtgatccatatctgcggtgatctgagccggagtttttctctggtcgatccctcttcccggacgttccagatctggccttccgtacagataaaaactgtccgcaatgagcacagattcatctcttaagagccggatgtctgccttttccaaaagttcatccatttggggatcgctgacctttttctccccttttttgctgaaggtaaagccggccagaatgcgttcctgaacatcatgattgccgtagcaggcatagactccgtatttactcttgatccccttaaaaatagagatcagccgctgggggtcatccaaagcttcatattgattgtcgaaaatatctcccgcaaacaccaccaggtcggcatcttcccggttaatttgctccaccatgcgctccatctgcctgctgccgatattgtagcccaggtgcaggtcagcggccaggaccacttttaaggaggaaatatctcctccatcctttggaacagtgatatcatagctggtggtgcgcaccaccctggcattataggctccccatagactggtgcccaggatcagcgcaatacacagggtgcccactgccacaaaggtcttccgggaccggagcttttcctgagaaattctcttgcttcttctcaggatcagacgcaggatgtctgcaataataaccaccaaaattacatagagcaaaacacccagccaataatttcccactagcttcataaaacgctgggctttgccctggggaagcaaaaagcccaccagaagggagctggccaaaaagacatacaccgccaggacaaaaatcctgactccttttcttttaaaatgcctgctgcaggctcccatccatttcaacagccatctggcaatatagatattcaggagaatatacagtggagacaaatagattgcgatcatcctgtgttcctttcctttctgtgtccttttgtatatttttttctttatacagaaccggaagctttacaaggtcccggctgaagaccggggctttttcctgggtggttctgtctgccatattttttgtactggcatagtcggtgatcccttttcccgtattgggattggaagaagaataaatctggtccgtgacaaaaaagcaaagcaggcacacactgatgccgaccagataccttttggggatccgcttcagcagattgtccaaaagcggggccagaagatacacaaagcccatgccccccactccgaataccaaaagtccttctgcgcagatacgtccgtggagattcaggaaatatcccgtgtaatcccaccatttcctcccattgtgggcgatctctaaataataagaggtaccatactccacaatcccgcacactgccataatactcagaaattcaaaaaccggccgctttctcagctgattcagcaaaaccagaatgaggatcccgccagacccatagatgggcagccagggtccatggagcactcctctgttcacaaatttgccgtctgtgaccaggtgcagggctacctcccaggtccagccgatcatggagaatgcgaaaaacatcatcaccaggttccacacagagtagttgcggatataatgaagggactccacccactttcttttttctttttccggcaccggagacagtctggtgggataggctctgccctccactgcatcctttaaattcaggatttttaccatgtttgcctggtatttttcatactctgcctcatcttttgtgctttgcagggcgattccaaaccaccggcacagaattccccggatccccttcactggctggagctggcaggcgggctccttcatcagagccaccacgtcactgtaggcagtctggatcacagtgtcctggggaatctggtacagataattgtcattcagcagggtccagccctctgactcgtccattctcatttttcgtctcaattgtgcgtaatattccgtaaacacagctattttataggggttcacatagaaaagattggccagacccgccgtggccgcacccaggagctcccaccccacaaaagatacctcgaatacaaagcactcccacttatgaccgtccatcatcctcctggacagacggatagtgtccccagggcccaggtctggattttcggctgcaatataggggaccagataataggagtaccgcttgatgacccctcccacaatggtcaggctccaaagccactggtatacagtagccacaagcatggtccaggatacctttgtccatttctttacgcgtagaagatacaaaagcctctgcaccggaattttttcataacaacggccttccagaaacacgcgtctggtgacaaccgtaaacatattttccaaaaagatccacactaggagcaggcccagaaaggccgtaaggatcagaagaagaagggccacattctctgatcccaccatggagtggatggcggacaataaggtgacaagaatagagccggaggtgacggagttaatggccatcgccagcacacccttgctccttccaagaggggatgttttgttttccggatctgtctcatactttttcttcaactcccgggacagtctttttccctcttcccggtctccctttatggactcccggatcacatctgcaaggccgatctttcccgccacagcaccccctggtatttccgtatcctccagcagctcagaagatgaggtggtgagtgttgtcatggaactggaaaactcgcttcccaatatagctgcagccagacagactgcaacaaaaaagatataatgtcttttcagattcactcttcccaggcgttttaattcttttctagttttcatcatttcctcctgctgtatgtgaatttcccggcattccataacagaacttccaggaaaaaatctctcttatcataccatacccctctatcgaatgcaattcctacccatcccaacttctgccccttctggccaggctgtttccataggaagaaggatctggccgggctttgttattacacaggaaagctcttaagcttccctgtgtaataacaaagctcagggccgccaaaaggccggccctgagtcttaaagaatgttataaactttttcttcctctgtgatcttgtgcttctactgctcaatacaatagctggtatgaagaagatgatgggcaatgggactgttgggttcctccaaaaattcttcataaacctttttgatggccggattttcatgggatttcctgtaaggaagctcccggtcatgttggaagatcgcctgggttctggcctggtaggcagcatcccggtctgtatccaaaagaagcttgggctgtccgccgccgctgatgcagccctggggacacgtcataacctcgataaaatgaagattcaaggtaccatttttcaccgcctctataacagggatcacgttcttcagtccggttacgatccctaccctcaaatccagatctccaaccttgataacagctgtgcggaagccttcccttccacgcacctgtgtcacctctacattggggatggactctttggtcaccagctcatagccagtacggatggccgcttccatcacaccgccggtaacgccgaagattgccccggcgccgctgtacagaccaagaggaagatcaaattcttcctggggcagactttcccagtcgattcctttttcctttataagccaggccagatcccttgtggtgatagccacatccacatcccggtatccgctgtctttcatttccggccgctcacactcaaactccttacaggtgcagggcattacagctacactatagaccttggagccttccagctcctccagatgagcgccatagcttttgaaaatcgctccgccgatctgctgaggactcttcgctgttgaaagatgatccttcatctccggatagttgttttccatgaatttcacccatgcgggacagcaggaggtgaacatgggaagcacccctccctttgtcactcttgtcaccagctctgtgccctcctccatgatagtcacatccgcagggaagttggtgtcatagactctgtcaaaaccgatccggcgaagagctgccgccagtctgcctggggtgagggagcccagcttctctccaaattcctctcccaaagctacacgcaccgccggggcacactgaaccatggtgaacagctccgggttatccaaagccgccttcaccttgtccagattgcacactgcataagctgcaaacaacggctcttttacagattccggcaggtgtctttcctgttttactttttcgtatgcttccttcccatgagtcagcacggacacataggatttacatttctggacacactgtccgcacattacacaacggctcacatcaatggtctgaggctttccctgctctcctacaattgcataggaaggacagacctctgcgcattcacggcagcctgtgcaaagattttcatcaattgctacaatcatgtactttgtcctcccttatctccaatttttcgtcaaaagcaatgcctctgccgctctgatgttcttttcttctctgtccgcctccggatccaccagacgcagggcctggtggggacatacgctgacacaggcagggccgtcaggcctgtccttacataagtcacacttggaagcaaataccttggtctcatcgctgccggtctgctccaccaaatgtccatccactgcataggggagcagggccaccgcaccaaagggacaggcctgcatacagtccttacagccgatacatttctcctcattcacaatgatctgatggtcaatgcggctgatggctcccttggtacaggcattcatacagggcgcgtcctcgcagtgtttacactgtatgggcatacagccgtattcaaaacgggtcaggaacagtctgggaactaccggaaccgtaacggttcccacggtcctgcccacatggttgctctcctggttatgtacagtaaagcaggcaagctcacaggcccggcaacctgtgcatttcgtgctgtcgcctaccacgaaagatcctatttcttttctcatatcaattaaccctcgtttctatggcagttccggaaaaaagccctaagagcttcttcccgcctgttactcactcctggggatgtgtctccaaataggcactcttggcagcctctgtccgctttctctccatggcctgcacaagctcttcctctgtgacaagtgtgagagcctgggtgggacagacacggacacaggcagggccggaggaaattccggcgcagagatcacatttatttgccacctttctttcacttccgtcaatctgtgcagatcctgccacgggaaccatgtcaatggctccgaagggacaggcgtccatacaggatttacatcccatacatttaccggtatcgatcagaactctgtggtccttaagagagatggctcccacaggacatactgccatacaggcaggattttcacagtgcttgcactgaaccggcacgctcaggcgcgcggtcttcaccatatgcagctttggattaaaagtataagaatcgggatcaatttcaaaaatatgctttccttcatgtgccaccacacagccgatcatacaggtacggcagccaatgcaaagatcagggtttcctttcacgaagtgattcatgccttctccccctttcctgtatcaatacccatctgggcacggatttcctcatacaggtccttcacatgctgttccgcccaggcctggtcctggattttctccacacggcaggcacagtacttatactctggcgtattgctgatggggtccaagtgggcagtggtcagctcattgcaggcgccgatccaccactgataggtcatgtaagcagctcccggcttcacacggtctgtgggcatacatctggtaatacaatagcctctcttagagagaatcttcacaagctcccccttcttcaggttcatccggctgcaatcctgggtattcatctgcacccatccaggctcatcctccagattgcgcagggtacggcagtttcctgtcatagtgcgcacggaataatggcccacctcacggaccgtggacaaactcatgggatattggtcattctctctttccaggggcggatgccagtctgtaccatagaacagcgccttgtggtcctttgtggcaaagattccatccttgtgcagataaggagttcccttgtcttccatggatttgtctctgcagggccattggacaccgccgtatttctcaattttttcataagtggcacccgtatagctgggacatagatcgatcatttcattccagatttcttctgtgttcttataattcataggatatcccatagctgtggagatctctgcgatgatctgccagtccggcttcagatccccctgaggctcaatgagctttcggaatctctggaagcctctgtctgcacaggtgtagacaccttcgttttcgccccagccggcggccggaaggatcacatccgcatacataccggtcttattcatatagatatcctgcataactacaaagtcacacttgtcaagggcctctctcacctctgccagatcagggtctgactgggcagggtcctctccgaaaatataataggcgtggatccgcttgctttcgtcctcctcatgaaggatccggtgaggaacatgggtgatgggacaccccacctgatcagaaagaggaacgccccaggccttctcaaatttctccctcacttcaggaactgtcacgttctggtatcctggatagcagttgggaagtgcgcccatatcacaagcgccctgcacattgttctgcccccggacagggccgatgcccatggagggttttccgaagtttccggtcatcagcgccaggttggccagcccctttaccacatccacagcctgtgagaactgacagacacccattccataaaggatcatggcaggcttgcctgtggcatacattctggcagcctcccggatagtctgagcggggatctgggtgatgggctccacatattccggggtatatttttcaattactttcaggaattcatcgaatccctttgtatgttcttcaataaatttcgtatctgcaagaccctcgttccagatcacattggccatggcatttaccagagccaggttggaaccgccctttaactgcaggtggatgtctgagattcttgcggtctcagtcacccttgggtctgcacagatgatcttcattcccttctgcttgccacggacgatcctcctggcaacgatgggatgagaatctgctccattatagccaaagcagagtaaacagtctgcatcctcgatctccgggatgcccatggacattgcgcctgaacctaaagaatacagtagacccgctaccgaaggcgcatgtcatattcgcgcgcagtggtccacattgttggtaccaatacatgcgcgcataaacttctgcataaggtaatttgcttcatttccggctcctctggcagacccggtacccatgatcgcatccggtccatacttttcttttatctcagaaagctttgcggccacataagagatggcttcctcccaggatacttcttccaaaggagatttctttcctcccttgcggatcattggtttgcggagacgttttgttaaaatctgaggatcatttaaataatcccagccgtaatgccctttcagacaaagagtcccctcgttggtacgaccgtctgccggaactgcgtccacaattttatttgcggtctcatccacagtaaacagaatctgacagcctgcaccgcagtagggacaggttgtctggacttgcttcaacgccatatgattccctccttttttatgtaaacttatttattgctcactcattacttcattattttaccattaaccaggcctatcttcaacaaaaaagctcttattttgttaaaattctgacatcatctggttctgtttttccatctctctttccaggatcttcacacaggcctcaatatcctcaaggccaagggtgggtaccccggacagcttccggtccgtgtctgtgatcaaggccaaaagcgtatcctgtctgcacacactttcctgaaagatccccctgcggataatctcaaatttcgggtaagatgaatttttaaagccctccaaaagaataatgtccgcctctggaaattctctgatcagatccttttctgaaatatcgtcctgctccttgatgaccatccatttgctgggtgaaaagatcccgcacccataggcccctgcctggcgcaggcggtaggtatccgtgcgctccacatcggcttgaaattcatgggcatcgtgcttgatcacagccacccggtatcccttggtggtaagctcctggatgattttttccaaaattgtggtctttcctgaatttttcactccgctgatggccaccacgtaaggtttcttcacagcatccataccttcaccttctctcctttttccaggctcttggtccctggtgcaatgtccagcaggcagttacagccccgaagggagccgatggctcctgaggaataaattccctggggaagagtgacctggccgtctctgtagattgcccgcacaaatcttctgcccttgctgctttttggaaaagaggcctggaaaatcccttctcttttctccatggcataccggtcatcccctgtgagcgcctgaagcatgggccgaagaagaagctccatatttgccatggccccaaagggatttcctgacaaggacaaaatcagcgtatttttgtattttgaaaaaatcgtgggagctcctggctttatatttactttccaaaaaatctgctctgcccccaaaagaggcaatacctgatgaagaatgtctttttttcccacagacacgcccccggtggttatcacaagatctgcatcctggcaggcagcttccaggcgcttggcaagactttggacatcgtccccttcatgagccacagacactgcaggcacccccaattctctcagcctggaggcagtcatgactgcgttggagtcataaatttttcccgggggaagggggcttccggcaggccacagttcatctcccgttgtgatcacccggatcacaggcttttcatacaccagcacctgagttctccccattcctgccaggattccctgctcggcaaaagaaatcgggctgccttttttcataagcaggcttcccttctcatagtcctctccctgaaagcaataattctcataaggcttcagggaaacatagatctgtacttcctcctccccatagtttgtatcctcctggcggacagctccgtcacagccagaagggaagggagctccggtcatgatccgcacagcttccccctctcctaaggaaacccctttggcatcctgtcctgcatagatgcatcccaccaccttcagcttcaccgggcgatccttcctggctccatcaagatccgctatgcggaccccatagccatccaccgctgaccgggaaaagggcgggttatcaaaccccgcccggacatcctccgccagcacatatcctccagcctcttccaccggcatctgtctggttcttgtaagcagggccgatgctttttgaatctggcttacagcctcttccagctctaactctattttcatgggcaacctctcattctgcattccggcttttttctcacttcacataagcctgtgcgcatttaaccttcctacaacacttgcctttgtggcaaatatctacaattttcgttcttattataacacaaatacaggcagcatcccaggatttatctgtaattttccctgctatcctctatctttccagtttttccagaacctgctcgtaggtttggggggtgttcatattttctatgttttcccagggaatgtctctggaaaacacctcatagccggttttgtccaaaacagaaaaaacgctgcaggaatgctctttaatcgcttcctggatcacacctttcagccaggtgttgtaaattccgatcagcggctctctcctgcccccatgctctaacagaagggcagagggtgcctgtctgcttctcaccatctgtccgtgggtaagtaagagtgcctccagtacctccaccgggatctggggcacgtccacaggcagcaccaggcagtaaggtgtctttgcccgctccatacagctgtggatccctcccagaggccccctgtttggatactggtccggcaccaccactgcatcctctttggtatagtcatggccagagatataaatgtccctgataccaagggtttttcccttctttaacaagatctccagaaacgtggccccctgtaaaacaagtccggccttatcctggcccatacggctgctcttccctcctgccaggaggatgagggaatagagctgctctatgtggaggggcaattcctgttctatgtattttgtcatgaaaatctctccttttgtccttctctctttctgtatcctatcatacttgtccagttcctacaccctgaactttgtggcaaatattgctttcctttattctccgtccgtattataatagatatgatttttcagggaggatgctatgattcaagagaattcctatatgatattacgccagctttttcacaatgcttttttctttttctatgccgtaattttcattaagtattggcgttatccaaagaaacaaacctacacggccatcaatctctatacggcagccgcttttgtggtgtaccgggtgctgcatttctatggtattcttccgctgtattacaatgcagcttattttgttgttttctttttgggaagtgcggttctgatcttttccctggcagaattccgcaacgggcagctgctgttttcctttttgagtatctatgtctttttatttatgggcagctccctgtcacattttctcattccccgtctgccctcccttttttatgttctgctgaagcaggctgtgatcacagccttttctgtggtcctgtacatctatttccggcccatcttttttcagaccatggagtgtctggacaaaggatggtttgagctctccctgatacctctggctattcttcccttttactgtatccttgtgttttctggggaagagacaattttgtatgtggccttttctgtgagtgtgggactgatttattttgccctgtactgggggctgaaagccattcaggaccagcaccgcagagaggcggaatatcttgttctgaacaaccagatcgaagaaatgaaaaattatgttggtcttatccaaaaggactatgaacagatgcgcatcttccgccatgatctgcgccattatggagttatcctggaaaactatctggaacagggagacaagaatctggccctcacctccttccaggagtttctggataaatacgtaaaggaatcccaacggtcttctgctgatccctcccacaggtttaccagctacaccggggactttctgatggataccctgctgtctctatatgaaagacaggcccgggaggattccattgatcttcaggtggccataaggatgcctcagccatttccagcagacacagtggaattctgtgtatttctctccaacagccttcaaaatgcccttcaggcctgcagggaaatcccccaaaatctgccgcggacagtgcgcatcactgctttcaccagacagcagcagtttttctacgaggtgcagaatacttattggggccaggtggcctttgacaagaaccacattcccatatctcccagaagcggccacggttatggctgccagagcatgaaagcctttgcccaaaaataccacgccattttggaatttcagtcagaggagggctggttccggctgcgccttcttctctgagataccctgagcaggcctggtccctgttatatagaaaaaacaagacagaacctgatggaagtcctgtcttgttgatggtgtgtctataaactctgtaagaattttattttggctgaatataaccttttgccttaagtgtctcagcacagagaacagctccgcctgcggcgccgcgcacagtgttgtgtgaaaggccgataaatttgtaatcatataccgtgtcttctctgagacgccctacggaaacacccattccattttcatagttgacatcctctgcaacctggggacggttgtcttcctccagatattggataaaattcttaggcgcactgggcagctccagctcctggggaattcctctgaattctctcagctttgcaatgagctgttcttttgtaggtttctttctaaatttcacaaatacggcggctgtatgtccgtttaatacaggaacacgcacgcactggcaggtgatcaccggctccgtggctgctttgatcacgccgtcctcaatttttccccacagacgcagaggctctttctcacttttttcttcctcaccgccgatataaggaataatgttgtgctccatctccggccattctttgaaggtttttcctgcgccggaaattgcctgataagttgttgccaccacttcataaggctcaaactctttccatgcagtaaggaccggggcataactctgaatagagcagtttggcttcacggcaatgaaaccttttgtggttcccagacgtttcttttggtattggatcacatcaaaatgttccgggttaatttccggcactaccatgggaacatccggtgtccatctgtgggcactgttgttggaaaccaccggagtctctgtttttgcataagcctcctcaatggctttgatctcttcttttgacatatctacagcggaaaatacaaaatcaacggtagctgctactttttccacttcgtttacattcattaccacaatatttttcactgcttccggcataggggtatccatcttccatctgggtcccacagcttcttcgtaggttctgcctgcgcttcttgcgcttgcagccaaggtaaccacttcaaaccagggatgattttccaacagggaaatgaatctctggcctaccataccggtagcacctaaaataccaactcttaatttttcactcataattttctctcctcatctaccaattcattatgtcttttatgtacacacatttgtcgttcctgtaaatactacctctttttccatgaaaatgcaagcacttttttcaggattcttatctgcttttcaaatactgccggttctgctccagcacctgcttcatcacatccggtcccggtgcacccagagtctgtctcttttccacacaggtcttcatactgatggcatcatagatatcctcctggaaggcagggctgatcttcctatactcctccagaggcagctcatccagagaaatccccttgtcaatgcacagcagcacaaggcggcccacaattgtatgggcatcccggaaggccaccccgtgattaaccagataatctgccgcatccgtggcattggtgaaaccgttgcgggcactggcagccatatttttctctttaaattccatggtggataccataccggtaaataaggccacacagcccttcacggtatcaatggcgtcaaaggtaagctccttgtcctcctgcatatccttgttgtaggcaaggggaattcccttcatggtggtgagaatgctcatgagagccccatagacgcggcctgtctttccccgcaccagctcagcaatatccgggttcttcttctggggcataatgctgctgcctgtactgtaggcatcatcaatctccacaaactgatactcattggaattccacaaaatgatctcctctgaaaaacggcttaaatgcatcataatggtggcaagggcagacagcagttcgatcacgtaatctctgtcggacacagagtccatgctgttgagagttgcactgtcaaatttcaggagcatggcggtgtaatctctgtccagaggataggtggtccctgccagggctcctgcccctaaaggacatgtgttcatcctctttttgatgtcatagagacgtcctcggtctcttttaaacatttcaaaataagcgcccatgtggtgtgcgagagtcaccggctgggccttctgtaaatgggtaaatccgggcatataagtatgtaaatgctcttccatgatcttctgaagggctgtcagcagcttcttcagctgggcgtcaatctcttcaatctcatctctcacatagagcttcatatccagcgccacctggtcattgcggcttctacctgtatgaagcttcttgccgggctcacctacccgctcaattaaatttgcctccacaaagctgtggatgtcttcgtaggcactggtaatttccagttttccggccttaacatcctcatatatgctgtccaggccctctaagattttcttcttctcaccctctgacagaattccctgcttggcaagcatggtaacatgtgccttgcttccccgaatatcctgctcgaaaaatttctggtcaaaggtgatcgaggcattaaaattatataccagctgatcggtttccttggtgaaacgtcctccccatagttgtgccatggctcttccctctttctgttaattttcacaatttcatgtgctagtgtatcatactttttttcctggtgcaatggacaaagccgccaaaccatgagaaaacccacgcaaaaaggacagagagccattcaccctctgtccttttttctttgtcttctcattttactgacatccgtctcctgccatcgaggcctttggtgacgctttcatttcgtcaggaaattttctttcaagaagtacctgcgcttcttttctcatctctgaaatcctggcaaggatatgagaagttttttcatactgccagtcttccagcaaacaattctcatgaagctccttcaactgtgcgtcaagacgatttacgcgcaattcaagattatttccggtatagaacagctcttcaaacatctgaatgcgttctgcttcatcccggggcactgctgccctcaccctctgaagatgtgcatatacatccttgcttaagttcttcaaaggtgctgtgtagattaccggcagaccttcatagtccgcttccgtgattcccggaaccgggatctcctccggctgtaccggtatttccgtctgtccgtctgatgaaccgtccccgcccggtgtttgatatcccggtgtgtcgtctgacggatcatttatctccggtttgttttcctgatctggctgaggcttgtcttgctctgaaggaacggtgggaagcacctcagtatccttgtctgagccgaaatccccgatcacctcttcatcgtttggatctgtaggaatctgattcgtgaattggttttctgttttttcttcatctggaatttcttctcctcctggaatcctgtccttatgatcaacaagctcagtgatctcttccatagtccctgtatgggcagtatccttcacagaatcctccattgccggcagctccgtttcgcctgccgtctctgccggttcttccaggtgcagctcctgtggcagctccaggtgagtttccggtgcaatcaaatccccatccgccgcaccatccatcatcggagcctctgccttggccatctgctcttccattcggatgttctgctcaataagccaatccgtgatctcctgcatactcatggatgccagttttccttcactgagggtgtcatccttctgcctgatctcctggataaaggccgcttttccctttgatataccatacttcctggcactttcggcaactgtctcatcagttccgttcagtgactggtgatataaggttccttcaatctgatccgcttccagaaccctgcgcacattgttcactactgtctgctggatctcaacagattttgctgaattcctgctgtccacactgatcagaacagaatctctgtcccggctgatatagccctcttcaatcatggaatccacaagtatctcaactgccttggtaagatttttccttttgagactgccttccaaatcgtccagtatctttaccccatctgcgtttaacgcttttacacggacaaccttcactgcgctgttcagctgcagttcaaggctgggattcacgtctaattccacaacggaatccactttcagcaatccataaaggtttcctcccaaaagcagcaggcagcaaactgccaaaaccgccgcaacacggtaggtatgggcccagagtccctgtctgcgcccagtcttaggcacacaggcatcatccagccaaatctcccgggtaagcttcgggctatcgtccgccacaatctgttggaataggtccggcgccatttcacggatgcctcgatggatactattttctacttcgttcatctgacgccactccttccatataatttctcagctttttcaaaccgcggcgatacttagataaaaccgtagaaagaggaagtttcatgattccggcaatctcccgatgcttcattccggtattggcatgaaggagaatgatctgccgttcttcatcggaaaggatagaaaacgcgccttctaaggcaatcctgtcctcaaagttggaaacctgtgaaaaatctaatgtttcttccagctcctcataggaggtgtgtacatgggcagactcctttcggatcttcatataagccaaatgcttggcaatggtgaagatccaggccagaggttttccctcgggctgatagagatgggctcctgtcttgatcttaatataagtatcctgcataacatcttccgcgtcctggcggtttttcaggatagacaggaggtaaccatacactgcctgatagctggcataataaagattctccaaggctttcctatcaccgttggcgattttaatgatccagtcttctctgatcgtagctgtcaagcgtacggtttcgttttgttcatccggaattacacaaaacaaaatcatcttttcacctgttggtaactttccctttctgatagagtaatgcatcaagcatcggttttattgcatcaaattaaaaaaaatttaaatttttttttcctgccttgccagagcctcctttttggagaagctgcagccgcagtaattctgcctgtaaagcccgtatttctctgataattcaatggaacgcaggtaaccgtttttcttcttaaaatcagaaggcagatggggaacctgccagatgcctgccagctcctgtccgatctcattgagctttcctgcatttttcagagggctgatggtgagggtggtggtaaaatagtcatagccttccctggccgccactctggcagtctcttccagacgcatacgataacacaaaaagcatctctccccgccttctggaatgtcctccagccccttggccatggaaaaaaacttctgagggcagtactctccctgaaccatggtaaccttgttcctggtctccatggcttcaatgagcctcctctgctcttccacccgtttctcgtattcttcctttgaagaaatgttggggttataataaaaaactgtaatctcaaaatattctgacaaatattctaaaacatagctgctgcaaggtgcgcagcagctatgaagaagcagcctgggaattctatcctcttgttgaattttctcgatgatcttttccagttctttttgataatttacattcgccaatccgttcacccattttcacaattgtctcgtaaccattttctgtattccacagaatatcttcatccacccagagttttccatgctgtaccaaaagtacgatggtagagcctccgaattcaaagcagcccttttcctggcccttatcgacttttccgggacctgtgtcagagttggtgatcctgcccaccagcatggctcccacctccatctggacaagggtgccaaagtacagactctggataagcgtgtattctctggcattttccttatacacaggcaccttctcaagggccgtgggatttacggtgtgatattttccgggtatgtacatattggaggactttacaccttcacagggatagcagtaccggtgataatcgtccacagtgagccggaagatcatggcataaccgtctgcatatctggctgagagcttttcatttttcagcagctctttgatggtgtagggggtatttttaataaggaacctggaatccccgccaatccggtacacggaaagctttccgtcacaggggctgaccaacacatgctcgcctttgtgaaccggtctctcctgaggccggatccttcttgtgaagaaatcattgtaggagcggtactttctgccctcatactgctccatctgtatatgataggcctgtacaaacttcgagatcataggcaccgacaagggcgtattcagaaaccaccccgctgcttttgacaaaatcctgctggtaaacatgggcagaaggatacgtcctccccaatcctggtacagatggcgcagaaacttgtcctgcccgttctcttcaatggttatattgcctttcctgtcgatatatttcattccttatcacccccgctggtatttgctcatttctataataaatgaaacatcttagccaatgcaagtgccacaacgccaatgatcaaaaaaaccaccggattctgaggcttttttattttaacatcgctgataaataaaatccccactgccagtactgcaaaatgcagcataaacaagaaatgcatgccccaaggctttttaaataagtacaaaatcggcaggatgatagccatggaggtaatgggaagtccctgataataatgccggacctcctcactctcttcctgacgcttctcctctgacacattgaaaaagcccagccggatcacagacgcgatgctgtagccgatcaagatcagtttgccgaagccgtggcgcattcccagacagtaacagatgatcactggaaaaatcccaaaacatacaacatcacacagggagtcaatctgaatcccgaattttttctcatcctctgtgcggttcttcttggtcctggcaattttcccatcaaacatatcgcaaaggcctgacatagccagacaaaaaatcgccacccggaagtctccctccagggcccgggtaattcccagcacggaaattcccagactgacataggtcagtactaccgtataatcataaaatcccagcatttgtatccccctcatgttgtttcttttgtgtttgtctcccaatggtcaattgtgccacgcaggtcatggccgcgctgatgagcatctgtccatagtaggaaattcccctgcttaacagcatggacggaagcagcgcactcccgaatactggtacgaacatgatcagatacagggtttcgctgatccccatccctcccggaaggggaagcatgtccactgcgatggagatcacagactgaaggatcgtgatctgcaaaaacccatatccactcaatcccagcgcccgatacacccagtaagtcaccgtaaacaggatacatctctgtacaagggtgatcaagaaaacaaacaaaatactcagcttatgtcctgcccagaatgccgctgtctcgtggtactgatccatggatttctccagcttctccattctgcttggcttatgcttcataagatgaaacttcaccaaaagctccagaccctttgtcatggcccatttggccagtcccggagcaaatacgagaatcatcatcaaggtaacacaaaatacattcagtcccagtcccagatagaatacccacatataatcccctaaatgcatgctcaggaagtctcttccaaatatcaccagcaagatgccgataaataccagcacagccttataggtaatggtgacgatcataagcactaacgtggatacagggatatccagcttgtctttcttcatataataaatctgcatgggctgcccgcctgtggcagagggcgtaatgcagctaaagaaaaatcctacaaaggaatacaaggcacaatggcccatcttcaccttttctcccagagaacgcatcatataaaagatgatcaccgattctccaatgataaataccaccacacacaccagggacactgctatataccgcagatccgccttcataagcgtatgccagatatcctctatatcttctcctttaaaaacaaaataaaccgtaagcgaaaagattgcaagcaaaaacagcatatttaaaattgcttttttatttttcttcaattctatccttacctttacccagttatccctttttactttcgtacagatgtgacggccttttttctcaaaaacaattggttctgctgtcacctaccactaagtgtcaccattatagcacactctacaaaaaaagtcatatcctaaaatagaatatgcttcattgggagataaaaaatgcaaccatttctggaaatgaaagacatctgtctctcttatcacagcacttccggggaaactgcggccctttctcatatttcttttactgtagaccctactgaatttgtagccattgtagggccgtccggctgcggaaagtccaccctgctgaatctgatcagcggtctgatgaaaccggagcagggcgaaatcctgatccagggtgaaccgctcactgcccgcagcctttctattggatatatgctccaaaaagaccacctgttggaatggaggagcatttataaaaatgtactattaggactggagatccgtcatgaacttacccctgaaaaaatccagcaggtaaacaacatgctggaaatgtacggtctgtccaaattcaaatactcccggccctcggagctttccggcggcatgcgccaaagagctgccctgatccgcactctggccctggagccagacctgcttcttttggatgaacccttttctgccctggattatcagacccggctcaatgtgggagatgatatcggcaggattctccgcaggcagtccaagcctgccattctggtaacccacgatatttctgaagccctgagcatggctgaccgcgtggttgttcttaccaaccggccggccacagtacaaaccataattcccatagatttggagattcccaaccgaacccccctttcctcccgaaatgcacctaaatttaaatactattttaaccttatttggaaggagctgaacaaacatggagaatctgtcaggccgacagaaacaatttctgaaaaagcagagacatgaaaagattcttatttctgttctgcgtttttttatttttgtagcttttttagcagtctgggagatcgctgcaagactcaagtggatcgattcctttatcttcagcagtcccagccgggtggtaaagaccttctataccatgtggctggaccagtctctgtttaaccatattggcattacggtgctggaaacaatctccagctttttcctggtagtcctgctgagcattggaatggccgttcttctgtggacctctcaaaaactgtccaagatcctggaaccctacttggtggtattaaacagtctgcccaaatccgccctggccccactgctcattgtatggctgggggccaatatccggaccattattgtggcaggcatctctgtagccatttttggttccatcatcaacctgtattccggcttccaagaggtggacccggaaaaactaaagctgatccgcaccttaggcggctccaagaaggaggaactgcttaaaatcgttcttccttcctccatccctcttatgctcagtgtcatgaaagtaaatatcggcctctgcctggttggtgtcatcatcggtgaattcatcggcgccagacaaggcctgggatatttgatcatatacggcagccaggtattcctctgcacatgcattgtgaaactatctgtcagccttcccttctatataataacgaaacagagaagcgtatggattcacgcttctctgcaaaattattttaatttttgaatttctttatcattctccgaaacatggtcttcacttcctggcatttatcacaaaggctatccgcatattcttccgatgtggtggtcacaacttttagatattaaggtctgagaaaattgattccttacttatcctggtaattccagtcatgatcccccgctccagataagggtttgatttgaaggctgcgttcaacagattcctgataaaatctataaattcttcccagtacccatttacataagcttcctgcatggacgtatcatattcgtccaacaaaaggattactttctttccataataacgctgtaaataattggataattgctggattgcaagagtgatctcataatctggcagtttttctgagatattcttgaaatcctgtttttcttttgcatttaatagatttccctctaacaggaaatcatattcatgtgggccctgtatctgcatcatacttcattttttcatatattttcttcaaatttacctgtctttctccatgatattctctatatcaccttatcacatggaaaaatttatatttttttctacattttttgcacaaaattatggaaatttcttttaaaaaattgtataattatacaaagaaatgaaagagaggattagccatgaaacaaagcagtatgttagcaatgatcctggccggcggccgtggcagccggctccatgatttgacaaaaaaagtcgccaagcctgcagtttcttatggaggaaaataccgtatcgtggatttccccctgagtaactgtgcaaacagtggtattgatgtagtaggcgtgctgacccagtatgaatcaattctcctgaacagctatgtagccgccggaggccgctggggtcttgatgccaaagacagcggagtatttgtacttccaccccgtgagaaagcagacaccaacctggatgtataccgcggaacagcagatgccatctcccagaatattgattttattgacgcccattctccggaatatctcctgatcctttccggcgaccacatttacaaaatgaattacgccaaaatgctggctgaccacaaggcaaacaaagcggacgccaccatcgccgttattgaggttcccatccaggaagcaagccgcttcggaatcatgaacaccgatgaggacggacggatcgtggaatttgaagaaaagcccgccaaccccaagagtaatctggcctccatgggaatttatattttcaactggaagcttcttcggaaaatgctcatggctgatatcaaggatcctgattccaaccatgactttggtaaggatatcatccccaccatgatcaaagacgggaaaaatctttttgcgtataagttcaaaggctactggaaagatgtgggaaccatcgactctctgtgggaggccaacatggaccttctcaatgcagacaatgagctggacttaaatgattccacctggaagatctataccgaagataccaccactctgccccagtatatcagtgcagatgcctccgtgagcaaagcctatattacccagggctgtgtcattgaaggagaagtgaagaattccgtgctctttaccggtgtcaaagtcggtcccggagccaagatcatagacagcgtgcttatgcccggcgttgtggtggaagaaggcgctgtggtggaacgtgttctggtggccgatggcgttcagatcggcaagaacgcaaaagtaggaagcgctgacagtgagcatattgagctgatcgcaaaacgtgtaaagggggctgaatgattatgtataaagcatttggaatcataaattcttccggaaggaatatttacgtggaaggaatgcaggattaccgccccatcggcgccttttccttccttggcagataccgggtgattgatttccccatctccaatatgagcaacagcgaaattgaccggatccaggtctatgtaaataatcagccccgttctctggtagagcatctgggcacaggccgccactacaacatcaattccaagagtggaagacttgagatcctgttctcccagaatcataacaagaatgatatctacaatactgatatctcctcttatctggaaaatattgaatgcattgagcggatgcatcatccttatgtggtgatcgcccccaattatatgatatttacggccgattattccaagctcattgagacacacattacgtctgaagcagatatcaccctgctttatcactctgtggacaatgcaaaggaagcctttttagactgtaacaccctgaacctgaaccgccagaagggcgttctgtccatagaaaaaaatcatggcaatgccaagaacagaaatatttttatggatacctatattatgaaaaaagagctgtttgtagatctggtacataaggcaaagtccgtttcctccatgtacactctggcagatattgtaagcgcacagtgtgaggagctggatgtaaggggcgttccccacaagggatattttgcctccatcacagatttcaagagctattatgaagccaatatggctctcattaactacaaggaagcctgtgagctgttccatgaggactggcccatctacacccgcaccaataactcctgccccacacactactttgactcagcagtgatcaacaatgcggttatttccgatggctgtatgatagagggaactgtggaaaattccattatcggcagaggctgtaccatcaaaaaaggcgcagttgtgaaaaacagtgtggtattggccggaagtatcatcggcgaaaacgttcatgtggaaaatcaggttgtggacaaacatgcacagttgatccatgccaaagagatcatgggtgatcctcagcatccgggatatattaaaagaaaagatacactttaatcccttgaaaaggttttaaaggagaaagcatacagggaggcgtttttatacgcctccctgtgtgctttctaatccaaataccaatcacctctaaaattcacccttttccctgataagctgtaccagccgggctttttcatttggggtgatcagcgcttcctgagccagaacatctgcaagcttgagcagaatctggttctgtactgccctcatcttccccttctgctcctcagcttttctttgacacataggtgattcaccgatttccgttttttctattttatgcttaaaccaacctgtcccttgcagttttttcccggatagtaagattatgaaaaaatctttcttaactttgcaaaaaaatccctgtttttaatgcagagaattctgtacttccttatggattatcccatattatttcgatttatctctcaaaattttataaaaacacagacaaatctgtacgacatgctgaaaataagacaagagtagtattgacatttcaataagactgtagtagtatcaaatcataaactactacagtcttatgattggagggaatagcatgaatatgaaactggtagatagcgaactaaaagtgatggacgttctttggaaggagggagataccactgcaaagcatatttccgatgtcatgactcaacggtacggctggaacatcaataccacctatacacttctcaaacgctgcgtgaaaaaaggggctgtaaaacgaacggagcccaatttcctgtgtcatgcccttattccccgagagcaggtacaggagcaggagaccgatgaactgctgcacaaggttttcgacggttccgttgacaaattgtttgcttctctgctgagccggaaaaaactgactgcacaacagattgaaaacctgaaacagatggttgaggagttcgggggtgatggaaaatgaacctattatctatgagcatacaagggggattgatcattttagttgtcacagtcattcgggcattggcaattaaccgcttaccgaaaaagacgtttcttgttctttgggggattgtattactgcggctgctgattcccttctctctgccttcgcccttcagcgtatactcccttgcaaaccgcaggggtgtaaccatacctgctgcacaagcgcccattctgaatttttctgcatttgcacaggttccacaaaatacgacaattcctgcagcccctgccactgcgtcaatttccatttgggtattcctatggggtgctggcacagttctgtgtgcgttttattttagctttgcttatatgaggtgtcgcagggagtttgccctttcccagccggtggaacatgcgtttgctgcagagtggcaggcacggcacacgctgaagcggcacatggagatcaggcagtcctcttgtatttgcgcacctctcacctatgggatcttccggcccgtgattttaatgccccagcagacagattggacagacaccgatcatatgcagtacgttttgacacacgaatacacgcacatacggcggtttgacgcggttaccaaaatcttgctgacagccgccctatgtatccattggttcaatccactggtatgggtaatgtttcagctttccaaccgggatattgagctgtcctgtgatgaagcggttgtccgttcctttggtgaatccatcaagtctgcttacgcactagcgcttatccatatggaggaacaaaagaaccgtttcactcctttttgcaatagttttagcaaaaatgccattgaagaaaggattaaagcaattatgaagattaaaaaaacatccctgtttgccatgcttatggcggctgttctcattgttggtgtaacaacgacttttgccacctcagcctcagacgccggacagacgccgtcgattcctaatacggcgtttacccatgaagaatatgaaaagctcactgctttacagtttgacggctacgagaatatgactgtggccgactatcaggaaaaagtctggacaaccacggatactccggaatatattacattgttagaacgtatgagacaggataacaccctttataaattaagggacaccaacgaaacagcatccttcctgttctatattttgagccctcttaccgcccagaagtggcaaacacaaagttttggcggatttgcttccacaaattacgaagcatcagacaatgcctcattggaatacctcctcacaatgtcaattacagatgcagatcggctgactgtcctagaatacaacaatacaagacttaagattgtaaatgccattttgttcctattacaggaaatgtctttggaggagcttcaaacagaccagacggagaagcttcaagaggaaattaccagccttgctcaaaagtacagttccgattgcctgcagctttccattgaattccgttttatgccgctgtccggctatgaggaaattttgaccgaaagcaataccgttggcgcttacacacaggagcaggaggcaaggcagaacggatatggaacagccgaagattatacttccctgcttgcccttaaaacctctgactatcagcaaatgagtgtgacggaatttaacgccgctgtgctggaatgggcaaatgaacattttgacggctgggaacggatccttgaggatgccggacgaaatgactatcaagtaaacttgacagacgaggaacgctcctttgtcgctctcacagtaatgctttccggtgtggaaaatggccgcatgatccaaagcttaaaaactggcaggccagaggaagattgctgggcaggcggttacaatctcacaaagcagatcaatgacaacggccgttctgcatggtgtaatttttattatcaatttccttataaaatactggacaaggacaagctcaccgttgaagaacgtgaccgctgcatctacagtatgcttcatgcaattcagaccttttgggaggaaaccccgctggaagatctgctaaaactcacaaagcctgatattatagaaaaaatgcgttcttttgccaaaaccaacagcagcaatttcatcacaattaaaatcgatgaaagccaagtacaatttgaaggcatggatgagagaaattacaatttcaattagcacagattgtctttcagataaccacagacaaaaaatatccacgactggacaattgtgtaccaaatgaaatacagcagtcaataggcggttttgaaatcaagtaatttcaagaccgccgtttttcttttccagtatcatccagtaccccttcccaccctttccatgaaactgtatccgcccgtctttttccaacgctttcattttgtagttgacacttgaacggctgatctttaactcctgggcaatctgtcctggggtaattctgggatttttcctcatgagctccaccagggcctccctctcctctctcttttgggccaggtaatcgaaggtgctgccgtaatcaaacctaagcttttttctatcatatgactcattaaaggtaatatagaaaaagtttggaaaaatcgtaatcctttccacttcctctaatatttgacacaccattgccctggcaaccccctctccttccttaagaaacttttcgattttcgtaaagcgcagatgaataagggaactgtccccccagttctggtccatacttttaatcttttcctggactgattttaagctttgatcaagggctctttgtttttttccataaatttcatctgagataattcctctaagaagcttatccaagagcacatccatctgggataggacctgctcctgccgaagtttttcacgagctatctcctgcccgggggccttatcctccagtacttctttcaccaatgacaatagttttaatagaatctcatctttgtccctgtcataactatcatgacaaatctgctgcaaaagtttccataatttttcttcctcaagatggatgttgtcacatccctggctttcacccgtacatactgcaccctgcccggacctgctgctttcaggtttgtccttttgaagcctggtacttgcacaggaggttcgtccggactgtagatagctcttgcacttccactggtacaccttttccccggttttatattttctgcgcacagacctgtaatatggctccccacagaaaccacagaaaagctttccgctcagcacagactttcccggatttttcccggattctgacttattttccgaagcgaagggaccactctctggaacctccttctgaaccttggtcctcctggatgaaattttctcattcgccctgtcccacagttcctctgaaacaatagcggggatacggttttcatagacaaactgttcctccttgggtaccttaaccgtcttcttcgtatcaaaatcaaagtgggtctggtgcatgacaaccgtccccttattgatgggatttcggatcattcttcggatatccgtgtctgaaaagggctttccttttctgttgcgcacaccgtcttttttcagaatatttgctatggtgcggcttccatacccagccgcgcacagctcatacatgcgcctttttattttggcctcttcttcaaggatgaccacagacttatccgcctgcttctggtaaccataggtattgtttgtgagaatgacggcactgccgtttttctggcggttaatatgggcgttatttatctttttgctgagctcacggctgtaatcctctgcaaggattgctttaattccggtgatcaaagcatcgtccgggctgtaatatttttgttcaatgtatatgtagagctttttttgagagactgtgagccggtctacaaacagataccagtcctttgtatttcgcataagtctgtcctgagatttgatcacgatcacgtcaaaactatccgtgagcagattctcatacaatcggttgtattgcgtgcgtcccttggtgctggtgccggaacggctttccacataagcgtctgtgagaatccagccctgccttttcacacattcctgggcctccttcacctgcttggcaagagcgtccttctggctctcctcctcggtgctgcagcggcagtaaatcactgcccgcagcggcatcccctgggacataagccccctcctttatgtataagcttttatttctcctggcttatacaccatgcattattacagcatatgcttccctcttgtcctattttcatccagtgacaatttcttcccgtcctaatttcttcctgtgacaatctcagcctgtggcaatctcagcctgtggcaatctcagcctgtgacaatttcagcctgtgacaatctcagcctgtaacaatttctttccgtcacaatttcttcctgtcataatgcgtgcacaggtctttaaactagactgggtgatcatgtctatcgtgattttgtgtgtgatagccatgattctctacggcattctcaattttgcagaaaagcgttatcttcgccgtctctgatgatcatccagcccgctgaaaagccgggagcagatgctttgtgtctgcccccggctttatgtgtgctcttggctttgtgtgtgctgttggctttttgcccggttcccatgaatcctcttatccttcctgcctcatccacaccaattttacatctttacaattccctggcatccattcataataataccagcaatacagaaaggaaacgaccattatggaaaaaatatggaagcgctccgcctgtccctacgactgtccggatgcctgcgggcttttggttgagacagatggaaaacgcatttatgaagtaaagggggatccggcccatcccgtgacccagggctttctctgccggaaaatgcaccactatgaaaaaaccatccaccatcccaaaagacttctctatcccttaaaacgcaccggtcccaagggaagcgggcagttcgtccggatcacctgggaggaggccttacaggagatcgcccataactggaaaaagatcataaaggaatccggccctgaggccattttgccctactcctactctggctctgagcatctcattgccaaccgatgcggtcacgcctttttcaactatctgggtgcgtcccgcctgaatcgtaccatctgctgcaagggaaagggggaaggctttgcccagatcattggctccacaccaggcctggagccctgccagatggctttttccgactatatcgtcctgtggggctgcaacgtgaccgctacctggatccacgcccacgcagaaattttaaaggccaagaaaaaaggggcaaaggtcattctcatagaaacctaccgtacccctgcggcttctcttgcagatgagaccattttggtcactcccggaaccgacggagctctggctctggccatggacagtgtcctttatcaggaaaggctgtgccatatggattttctccgggagcacaccaagggttatgaacccttcctgaactctcttttggactggtctccagaaaaggcagcctctattaccaatgtagaccctggtgtgatccgcagacttgcccttgaatatgcccgggccaaatctcctgtgatccttctgggagcgggcatgtcccgccacggaaacggagccatgactgtccggtgcatcaccaccctgcccgcccttgtgggcgccttccaaaaacccaacagcgggatcgtgggaaatgtatctaccagcagcgcctttgcccaggatctggtaacacggcctgattttatgaaggagcccgccaggatcatcaacatgaaccaactgggacaagccctcacggaccctgccatggaccctcccatccgctccctgtacgtgtacaactccaatcctgcctgcgtcacctccaaccaaaagctggttttggaggggctttccaggaaagacttattcaccgttgtccatgaacgctttctcacagatactgccaaatatgcagatcttatccttccagccgatacctccctggagcacgaggatctggtaactccctatggagcctctgtgatccagcacacctgccaggtaatcacccctcctggtgaatgtagaagcaactgggatactttctgcgccctggccaaggctatggattttcaggacccgtacttttccatgtccaacaaggagatcaaagaattgcttctgtcccagcccactccctggcgccgccggctgagccctgccaaagaggcccgttttttggaaggatacgcagtccctctgcctgtgccaaagccctgggagtttcagacagaatccggcagactggaattttaccgggaggacctgccctttccccttccctgctacgtgcccaactatggaggcccctatcccctgaagctggtcattgcccccagccagtatactctgaattccaccttcacggagcgggaagaccttgtggaaaaaagaggccccatagagcttctccttaatcctgaggacgctcttacgcgggggatctcccagggagaagagatcattgcctttaatgacctggcacaggtgcacttttttgccaagatcaccccggataccccaaagggcaccgtcatctcccagggggtgtataccctggagcaaagcctgaatcagctcacagccaatgctctgtgctcccaccgtctcacagacgcaggagaagggtccacctactgtgacaataccatagaaatacgccgggcagattaactgtccggcgcatattctctaacgtctgtttaaatcctggctggtaaaccgcatgggaagaatctcttccaaggtgtattccttatagtcctccagggacctggccaggatgatcttaaaatctccctggcagaattctgccatcacctgccggcagatgccgcagggtgcacagtactcaaaggtctctgaatccatgggttttcccacaatgacaatggcatcaaagcagcgctccccttgtgccactgcctggaaaaaagctgtgcgctccgcacaattacaggctccgtaggaagcattttcaatattgcagccctgataaatgtccccctgggaggtgagcagagccgcacccacctgaaacctggaataaggtgcataggctttcgtctgagcttcaaaggcctgtctgatcaattcttttttatccataaaacccctactccttccatatgatttttgttgtttttttagtttagcattttcacggaccactgtccacaacttcctgtgaaatcccattgaatcccctctccctttctgctatagtaggaaagtatgagatttttttgaggtggaaaaattatgaaaagtacgaatttaggcaaagaccgcatcttcgttctggtgctgaagctggcaattccagccatgatcgcacagttcgtgaatgttctgtacagcattatcgaccgtatgtatattgggcacattccccaggtgggggaactggctctggcaggcgcaggggtgtgcgggcccattgtaaccctgctgtcctcctttggcaccttgatcggtcttggaggctccattttaatggccattaagctgggggaggaaaattaccggcaggcaagggtgatcctgtccaattcctttcttctgctcacagttttttccggggttctcactgcactgttcctggtatttaaggagcggcttttaatgtggttcggagccagtgcctccacatttccctatgccaacacctatatgaccatctataccctgggaaccttttttgccctcatgtccatcggactgaattatttcatcaactgtcagggctttcccatgatcggcatggccacggttctcacaggtgcagtgaccaacatccttttggaccctatttttattttcctgttacatatgggaatcgcgggagctgccgtggccaccgtgatctcacagatggcttcctgctcctttgcacttttcttccttttcaaaggaagaattcatgtgcccatcacctttggaaactatcaggtaaaattaatgggaaagattctgtatctgggaatctctcccttcctgatcctggccacggacagtgtgatcctcattgcacttaacacagtccttcagaaatacggcggcccccaggagggagatatgctggtgacctgtgccgccattgtccagagctatctactgatgatcacctcccccatgctgggaatcagcagcgggacccaggccatcatctgcttcaattacggagcccagaacagtgaccgggtgaaaaaggcggtgaaaagcatccttcttttaatgctggctttcaccacggtcatgtttttggtatcccagttccttccaaagcattttgtccggctcttcacagaaaatactcagtatatgcagttctctgtgtgggccattcgcatgagcaccctggccatcatccccttgagcttccagtatgtgtttgtggatgacctcaccgccctggaacggacaaagactgccctggcactttcccttttccgaaaaggcacatacctggcagggaccatcctgctgccgcttttcttcacagccaaagccgccttttttgcagagtccgtttccgatatcctgggggcctgctgctccactgtggtctttttgctggtatttgaaaagcatttaaaaaaacgggaagccgtcaggcttcccgcagatggacaagaattatccatttcttgattcgttctcctcaaggagataggtgagatactgggccgccatctccttgtggggcgcattggcggctatcgttacatatacagggctgtataccagctccaaatagtcagtgagtgcaggcacctgatccaggaccaacgcatacccatcctctgtaagggtatatttttcctgctgctcctgagtaagcagttctctcaggtccaaaaacagttcctgttcccggtatccctcatagagagtgaccggaccaatgagtacatccaccgtctgagcgctgatgcttgtgaccaaggctgcctgagaggcatactccatctggcttgtatactgcagggcagttccctcttcatccgctggctccaggctgaaggacaggttggcagcgatttccactaagtcccttgcattgtcattttgcagatattccttaaaattatccgctaaaacctgagtttctcccattcctgcattggcgatggagatggacaggatggtattattcttcttgttgtcgtatacttcccagagcagattgcccaggatgatcacgccgatcagagcgaaaatccataccttataataagcccagatatatcccagctttcctcccagtgacatggtggacagcttttctctttccagaatccgtctttcttttttcgtcaggtcactttcgtgcttattctttagttcctcatagatttccgaagattctttcttttttcccattggtactccttatttcaaaaagccgctgacgatctgttcctctgcctcctgctccgtaagtccaagagtcataagcttgatgatctgctccccggcaatcttgccgatggcggcttcgtgaattaacgccgcatccagattcttggccgtcagctccggcactgcgctgatgttggcatgatccataataatggcgtcacactctgtatggccgctgcacctggcttctccgtacaggtgggaaacaaaaagctgataggaattgtctctggccacagagcgggatactacattggccgctgaatcgtccccctccagatgtacgtcaaaatagctctccgccctctggtccccatgggtcatgagacgctccatcaccaccagcttggctccttctccaagcacagccttgttctctctttttgtggaatccacacctttgatctggaccgtgtccatctccatatagctgttggcctccatatggacctctgtcacgggattcatgatcctctctcccttgccgtccccgcttccataatgcttttccacatatttcaccctggcatccttttcaatgaaaaagcggtggatgccgtcatggcgggttctggagtccccggcattgtgaatgccgcagccagcaatgatggtcacatccgctccttctcccacatagaaatcattgtataccacttcctccagtccggactggctcatgatcactggaatgtgcacactctggcgtttagtgcctggttttatatgaatttcaattccattattttccttcttggaaacaatctggatttcttccgtgctgtttctttccacactggctccgttggccctgatattgtatgcccccaccggaatttcatgcagtccggccactgcctccaataattctctttgtattgcgtccattttgctcctccgtctttgaccagccttacatggctttcattttactacatccgaattctgccgcatctgcagtccccagaagactgggcaggatctcttccttgccgccttccttcacaatctggccgtctgccactaccaggatcttgtctgcgatatttaaaattctctcctgatgagaaatgatcagaatagagccatgaagctgctccctcatatgctcaaatacatggatcaaattgtgaaagctccacaggtcaatccctgcctctggctcatcaaacacacaaacccgggtctttctggccataatggttgcaatttcaattctcttgatctcaccgccggaaaggctggtgttcacctcccggttaatataatccttggcgcacagtcctacctcagataggtattcacaggccccgctgatggtaatatccttccctgcagccagacggatcaggtcaaagactgtcacgcctttaaagcgcacgggctgctgaaaggcatagctgatgccaagcttggccctttcggttatgctcagctgtgtaatatcctggccgtcccagagaatctgcccgctggtgggcttttcaatgcctgcaatgatcttggccagggtggactttcctcctccgtttggccctgtgataaccacaaactggttgtcctccagggtgaagctcacatctgttaaaattccgatatcctgggcatcccgtgatttttcattgggaacctggaaacttatgtgttttaattccagcatcttgcgtcctccatctatggtttttatccggcttgtgccgtaattttttcaacaatgtttatcataccacattattgtaaaaaagaatagccaaatctttccttatccggcgccaaaactagggagaaagccagctggaatccaggcgtgcaatgagtctggcgttgttgtaagccatgcgcaaagtgagacaggtgcgtcccagataccgggtgccgtctccggtcttcacacaggcaagtgccaggtccggtctgcccggggtctgaaggcagatagggatgagaagctgaatggtccggctgtagtattggggaatggcagtcttataatccgcctccagcatgcgcctggtctggcgcagcgccccgtcaaaaagctgcatacccagacggccgctgcggatttgctctggaaggcggctcatattttccttgtctccaaagatatgctcatactggggaatcacctccaaatgggtatcgaataccagatccgagggatttgtgaaatagttggccttttccggcaggtctgtgattcccatcatgagcagattgtagtctgtgtaaaatccatccaggaaccagggctggcggtttggtaccagattaggcacaaaataagcatagattggctgataaaacacattgaataatccagtattaaagattgcataggatttctcctccctgacttttccctcttccaacaggcgattaaaggtatgctctaaataactttttaagatcccatagtctccgctttggtcaaagctccatttctcaggggccatttgggcgagattttgtatctgccggttataattcccgcagtaagtgaaatcaaataaattcataattacctcccatctgatttatattttcaccctcatgaaaccttagcttttgtacctgccgctgtctatccggacattcctgccacaatggcatatcctgccagatgcatcggcctttctctatcaatatattgtgaaaaatttatgacagaactgtcatttgatcaagatacccccaaaggggaaagactgctattaccttatcataaattcatttttttagcaatggcaggtgcctcattttttcttagccttatccaatgcaattcataatgacactaatcatcatttctttctcttccggtttagattccgctatcataatggtcaatgcaaccagtgtataatcatctatcaatttctcatcattcacaaacaaaattccgtttttatcgagaaaataaaggaatattgttgccgcaattcttttatttccatcaaagaagctatgattttttgtaataaaatacaatagattagccgctttttcttctaacgaaggataaacatcctgtaaatcaaaactttgataaatatttccaatacttcctttaaaggaatcatctttttcaactccaaatatatcagaatccgtgttaaatttcatattgtcgattacatgccggcattcttcataggataatatataaacagcctgattacccgatggacgtttcatggtctgatgatcgtaatcatctaacaactctagtgcaagactgtatttttcgataactgacaatacctgttttgcatcgaggctattctctgttcgtttcataatccgtatcacctctccaagctgattgatacgattattgttcactgcatagcctttcagtatgtattgtttgagaacagaattcgcccatctgcgaaacgctactccctgtctcgaatttactctgtagcctacagaaataattacatcaagatcgtaataagctactggctgctttactcccacaacacgcattttttgcgtgttgttctctctttcaagttctccatcactgaatattttatttacatgttttcgaattgttttttcatctcttccatacaattcagacatctgattagctgtcaaccataccgtatcttcatctggagtcacattcacttccaaagtcagctctccatcttcaaacaaaacgatttcatttttcttaaaatcaaccatatatttatcctccttacagattcatcagtttttcaaaacttaatatcttccttctatcacacaaacaaaagagatactttttttatccacctaacaagtttcatttcttggtacaaaggaattcctgtttttttcaagctgagtatgctataatgggctacataaatttttttccaaaggagagcctgacatgacaaaacaagaatttcaagagctgacacaaggaatccttctcctggacggagccacaggctccaatcttctggcagcaggaatgcccagaggcgtatgtacggaggcatggatcctggaacatagagatgtgctcatagacctgcagagagcctatgtgaaggccggaagccggatcgtatgcgcccccaccttcggaggaaaccgggtgaatctggcttatcacaacatgggagaccggctggaggagttcaaccacaagctggccgctctttccagggaggctgtgggagcggacgcctacattgccggtgatatcaccaccacaggaaaactcatggctcccggaggtgaccttacctatgaccaggcctatgatattttcactgaacagatcacctgccttgtggagggaggggtagacctgctcattgaggagaccatgatcagcattgaggaaaccctggctgccctggatgccgccacccaggtgtgtgacctccctgtcctgtgcaccatgaccgtggaggcggacggaagtctgttcaccggcggcaatgccctggaggctgccctggccttggaagcagccggcgcctgcgccgttgggatcaactgttctgtgggaccagaccagcttgtgtccatcatacgcaccctgaaggaaaacgtatctgtccccattatcgccaagcccaatgcaggaatgccccagatcaccgatgaaggccaggctgtgtacagcatgtctgcagaagattttgcccgtcatatgaaggttctggctgacagcggcgcttccattctggggggctgctgcggtacgaccccggcctatatccaggcagtggcagaaatcatggggctcaaaggtgccctctgaaatctcctttcgtaattaaaggggaaaactttcaataacaaaagccaggatatctgcagttgaaaactgttttgtatcctggcttctcttttgttttctttttgctttccttttgccagcaaggtgccggcatactctttctgtgccagcctgcttgcactgtggcctgaattgttctggaccactatcaggacggcctggactttctctgccagcctgccggccttgtggccttgctcttataactttattatttcacgataattgccttttttgggcacatttcctggcagcagtagcagcggatacatttcttatagtcatacacaggaggctgcttccttccattcttaaatttcactgccttttccggcaccggacagctctccacacagatcccgcattttacacaccggtcctttacaattctgggtttcttctggaaaattttcaggatcctggccatactcacccaagaatccttcctctcccgcttccggtccacatgaaaatccgggtttccgtaccgctgtgcagcctcctggcaggaaatttctccttctggtgtgaggatacagattttctcctcctggtacacacccaggcccattttctgtccgtggtaattggtgggcaccatctccggctttaaataaatcagtctggaaaatacactgtccaaagccactggatcctttgacagcaacagcaccttcataggcacaggatccccggaaccgggaccattcccttccatagccacaatcccgtccatcacatacagcctcggcttcacataggtattaatgtccaccagcattctggcaaagctgtctgcactggggtactcggtatgtcccttggctttataaaagccatagataaatccgtagctgtttttcactgctccggtgatacgctccaaggcatgagtcttcatcttacacaaagagataaccccatctgcctccagaacctccttacacagccgcaggctcttggcctgctttccctggggatagtccctggctcccccatccgtcaggtccgtgatgcacacctgatatttacccagaagctcctttgcccctgttccttccaggattttcccggtagtaccatgcccgcaggaatcccccagaagtatgtccctgcagcctgcctcccaaagaaggcggcagaaacctcccatcaccaccggatgggtcatcactgccttctccacctctgcctttttcagcagattgggctttaccaaaatagtttctccctcccggacaaactgctccattcctcccagaagctcaacgcccttcttcagggcctcatagacattctcctggtcatagtccccgcagggcaccagtgccaccgtgcttttttcttccatagctgactcctttactcctgaaatgctctgctctgacgtaccaccttgcgaacaggcaggatacaggcaggtaccacagacaaagcgtccaccccgatcttcacaaaatgctctgtgagggtggtgtccgctgccagctccccgcagatggtcaccttacagccggatttgtggccttccttcacaaccatttcaatcatccgcagcacagcgggatgatgatcattatatttaccctttaatcccggattctgccggtccatagccaacgtatactgggtcaggtcattggtccccagacttagaaaatccacttcctttgccagctctgcgctgatcatcaccgccgcgggcgtctcgatcatgattcccacagggagatgctcattgaagggaatccccttatccttcagccctttagtaacttcctgcaccaatgccttcacctcccggatctcttccagggaagagatcatggggtacatgatcgccagatttccatgggcgctggcccgataaatggcccgaagctgcgcccggaacatgtgtctccggtccaggcacagacggattccccggtttcccataatgggattggcttcctggggaatgtccatatactctgactgtttgtctgctcccaggtccactgtgcggatcacagagatcttctcacccatgaattccgccaccttcttgtaggctctatacagttcctgctctctgggataagtctccctgcccagatactgaaactcgcttcttaaaagcccgatccccgatgcaccataataacgcacactgtttaggtcatccaggcttcccatatttgccataacacttacaatttttccatccatggttacatctctggcatttttcagcttcagcaggtcttcccgcgcctctgtctctgcctgcctgcggatctcgtattcctttttcatctcagaatctggttccacataaagagttcccgtatagccgtccacaataacctctttcccatcccattccccagtgacctccacatctaccagggcagggatattcaaattctttgccataatggctccatgggcaacattggatcctatatgagtcaccactgccaaaagcttatccttctccagctccaccacatccgtgggggagaggacctcagccaccaggaccccaggggattcgtgggtgaccttttttttggccatactttccacaatggtgagaagtctgctggtgagcttctggatgttctggatccgtctgcacacactgggtgtctccagccctccaaaggtggtgatcagctcttccttggtcgtctccagcgcataaccagccgttaccttttccagtgagatcatactttccacagcctttctgaagcttgggctaaggagcaggtctaaaagctcctccagctccccccgggcctctccctgaaccttattggcctgcatggaaagctgctccctacagctgcggcacacgttttcaaacagctccagctcctttgggatatcctgtgccaggttctgccccatccttctctggtttcggtggtagtacctggcatatccgatggcgatccccggaaacgtcgcggttccctgaataacttccatttttcctctcctaactgctctttcctgctttccctgccttaatcgcaggcagcccggaattccgtccagtttttgctgtatgcctcatctgcctcagccccgatattctggacaatctcacccttggtcacagaatcgggcaccaccagattttcatccaccagctcatcggcagctttattggtactgtaatatccaatataattaaagcactgggcagcaacctctttgtccaaaatataatccatgaactgataggctgcctctttgttgggcgcctgagaaggaatgaacatgttctggataccaaagcccagcccctcctgaggatataccaccttcaggtccggattctcagccagggccgcagtcacctgagaggtgtacaaaaaggccacgctggcctccccgttgagcagggcattctgggtgtcagaatcctggataaggcggatattgggagcaagctctaaaagcttctctcctgcttctttaatatgctcgggatcctcatcgttcatgcttcttcccaaagtcaggttggtgatcccgttgatcacccggtaattgccgataatggccacactgtcttccagggaaggatcccacagatctgcatagcccttgatctctatgtctacctgttccggatcatagacgatcagcgggatcccggccccatagggtaccgtatattcatcctgaggatcataaaactgtccctgatacaggggattgatatttttgtagttggacagcttgtccttgtccagtttttccaccagctcctgttcaacggcggtttctataatatagtcatcggcaactataatatcatagtcgccgccctttgcctgggccagcttctccagcatggtctcatcactgtcaaagttggaatagatcaccttaatgcctgtcttgtctgtgaatccatccagaatctcctgtgaaaattctccctgccaggtaaaaattaccagctcctcatctgctgcctgcacctgcactgccggtgcaagaatggaacctgccatcattgccgcaacggctgccgctatcattttcttcatatgaattcctcctattttgccttgacctttgtccagagttccgcatagtactgcttgatcttcggttcctggtaggcgaagatctcattgttcttgttttccacattgggcacataggcgcccatgtccttataatcttccctgcgcattacctcaaaagcagatgctacagtagaactgtaacccacttctcgggtatttgcaagagcattctcatcctccagcataaaattaataaagtcgtgggccagatcctggttgacacaatccttggtgatcaccatggcatcataccagatattggttccctcttccggagtaaaataatccatatccgggttctcgctgataatataagaagcatcccctgaataaaccacggccagggccttgttgccggagatcatgttgtcgatcacatcatcccctgcatagatgggttccatggtatcccgctggcggataagccaatcataggcctcctggatctccttctcatccttggtattcatggaataaccgcaggcctttaatgccaccataaaggaatctctctccgaatcatacatgtagagatctcccgcatatttgggatctgtcaaaagattccagccttgcttcagatcctccttgtccaccttggtggtgtcatagagaattcccaccgtcccccagaaataaggagcagaatactgatttcccttgtcataggaacggtccacaacctctggaagaagattcttcttgtttggtatttttccccattccaatggctggagatattcctccttgatcagccgctctatcatataatccgaaggcactaaaacgtcataggtctctccgctgctgagcttggtatacatcatctcattggattcaaaggtttcatacaccacattgcagttgtattcctcctgaaaagcctccagcaggctcagatcaatatattcccctgcattgtataccttaagggtcttctttcctcctgcgctcatcgttccacagcacaccagggtgatgcccagcaccgccactagaacagcagccaggactctctgaagccgtctgccaaatttggaggttttcttcttcaaggtgggcagcaggttggtaaataaaagaatcaggataatgaccacgatcacaatggtagacagagcgttgatggtgggattgatcctctttgtcatgttgtacacaataatggaaatattcttcacaccatttccggacacaaagtaggagatcacaaagtcatcaaaggacatggtaaatgccagcaaagcccctgcaaaaatcccctccttgatcatgggcacgatcaccttgatcaatgcctgaaaaggtgtggctcccaggtccatggccgcattggccaggttgggatccagactcctcaccttgggatacacactggtgatcacataaggcgtacaaaaagcgatatgggccatcagcatggtaatatatcccttgcggatccccagggaggtgaacaggatcatcaggccgatggcagtgacaatctccgggttcaggataggaatgttgtttatatttaaaataaattcctttaagattttccgggacttggaaagtccgatggcggtaactgtccccaggatcgtggaaataatggtcgccagaatggccactgtcacggacacatacaccgcctgcaccacctctgtattattcagaagggattcataccaccgaaaagaaaatccggtaaacttggtaagggacttggaagagttaaaggaaaaaatcattgtgaccaggatcggcaggtaaaaaaatgccagacacaaaaccacataaaatttcgaaataaaacctttcaaacctttcatacacccaccccctattctttctcttcctggccgtccattttcttcatccagtacatgaagaaaagaatgatcacagccaggatcagggaaatggcgctgccgaaattccagtctcccacggaaataaactggttctcgatcaggttaccgataagcatgtactgtcctccgcccagcagcttcgggatcacgaaggtggaaatggacagcagaaataccatcataatgccattgatcactcccggcagggacattttccagatgactcttgtaaaagtctggaatttattggctcccagatcataggcggcctcaatgagagatttatccattttacttaaggacgtatgaatgggtatgatcataaaaggcataaaattacagatcaatcccaaaacaacggaaaaatccgtatacatcatagtaaccggagataatcccagcttttccaggaactgattgatgatcccgttgtcggaaagcaggttcatccaagcataggtgcgaaggagcagattgatccactccggaatggtcaccagcaggatcagcatggcctgcagcttctcatcaaactgggagatgataaaggccagggcatatccggtcaccaagcagatccctgtggtgataagtccaagcttaaaggatttcaggatcacacttaggtaggtggcctccaggaacttggcgaaattgtcccctgtaaaataccaggccattacggagttgccgtcctttgtgaatgcataaaaggcaatcatcagaagtggaaggacgataagaaaaactccccagatcacataaggcagaaccagtctgcggaactgtttcatcagtagctccccatgggatacatcacgtgaatgtcttccggtcccagctttagtcccacctgtctgcccacttctgcataatcggtggtgtgaaccatgtatgtgcggttctgggtctccacaagaatctcataatgcacccctttaaaggtcacattgcgcacaattcccgtgatctttgcctggtccggctccacaatgtccagatcctctggccggagcaccacttcgatggcttcgttttcttcaaatcccttgtccacgcactcaaactcaaagccgtcaaattccaccagaaaatctcggatcatagtgccgccgataatgttagactctccgataaagccggccacaaaacggttttccggctcattgtaaatatctgttggagtgccgatctgctgaatgatcccattgttcatgaccaccacagtgtcagacatggacagtgcctcctcctggtcatgggtcacatagataaaggtgatgcccacctcccgctggatcttcttcagctcgatctgcatctgcttcctgattttggcatccaaagctcccaaaggctcgtccagaagcaggaccttgggttcattcaccaatgcccttgcgatggccaccctctgctgctggcctccggagagcagggtcacatcccggttctcaaagccctccagacccaccatggaaagcattctgcttaccttctgggcaatgaccgatttgtccacctttttcagatgaaggccgaatccaatattctgtgccacgttcaaatgtggaaaaagggcgtatttttggaatacggtattcacctcccgtttataggggggaagctttgaaatctcgatgccgttaaagaggacctctccgtcgcttggctcctcgaatccggcgatgatccgcagggttgtggttttcccacagccgctgggacctaaaagggtaagaaactcattttcatatatatccaggttgatccccttgagaacctgctgatcatcaaagtttttcgtcagattctttaattctatcagtttattcataactcttctcccgcctgttactatttattttttcgcttttgttttccgtctgaaaagaaaagacagcagaaaaataccaatggtagccgccagcatgcaggtacacagggcgttgatctccggtgtgacgcctgccttaagctgggtataaactttgatgggaagcgtggacagacgcggcccatttacaaaaatactgatcaccacatcatccatggacatggcaaacgcaagcaaagacccggacattaccgcaggcatgatcagcggcagggtaatatccaccaaagcccgcataggggttgctcccagatctctggccgcttcctccagggaaggatccatgcccaccagccgggcttttacctccataaaaatatacggtacacagaacacagtgtgccccaatattaaggtgagcatgccaaagggcagatggagcatggaaaaaaacgccatgagcaccatacccaaaataatttcagggatcatcaagggcagaagggaaatatattccaggatccccttgctcttccagtgaatccctgacaggccgatggcccccaaagtcccgatcaccgctgacacaagacagcttaatattcccaggaccaagctgtttcccaaagcctccagcaaggcgctgttgtgtatgagctgctcataccacttcagggaaaatcctgcccactttacaggaaggcgggattcattaaaggagaacaccaccaccactgctattggcagatacatgatcaaaaatatcaaaccaagataaaaattcgcaaattttccgtttttcctcatcccagtccctccagttcttttgcattggccactttccggtagatcacgatcatcactgaggtgaggatcagaaggatcaccgccaaagcggcggcgaagggccagttgcttcccctggtcatctgttcctcaataaggctgcccaccagaacgatcttatttccccccaggatatccgcaataaaaaacagacccatagacgggataaaggtgaggatcacccctgacaacagccccggaagtgtcagctttaaggtcacggtaagaaaggcataggaccgggaggcccccagatccctggctgcctccaccaaagaccagtccagcttctccgcactggaatacacagataagatcataaaggggagcagtacatagatcatcccaatgacaatggccgggtagctgtataaaatactcaggggcttttccaaaatacccagcttcagcaatagagtgttgagcactccttttttctgtaaaatgatcatccagccatagaggcggatcagggaattcagccagaaaggaagcatcaagagcagcatggctcttttcttccagcgggctttcaatttcgccataaaatagccgaagggataaccgatcagaataatgcacacggtgctgatcaaggcaagctcaaaggattccccaaaggttttcaaatacaccgggtccaggatccgcaggtaattgtccagagtaaatttccattccacgccatacccgtctgctttggtggcaaagctcagggcaagcatataaaagagagggcctgccacaaagataatcgtgaacagatagaggggaaggatcatccagatatttcttttcttacttttcatctgcatccccccaatccaccaggaccgcatgctccccatcccatcggaagcagatgcgctgtccttctgtcacattggcgtcaattccgtaacggctggagatgagctgcacctcctgggatacctttaacaccatgcgcagctgacctccggaaaagcttttttccgtcacctgggcttccagtccgcagccgcagttttcgtccagctggatattttcacttcgcactgcaaaacgcacttgatctcccacagccacttttttaccctgaagacagataagggccttgcccccgcaggtctccaccagagcctgctcctccagcacctgaaccaccctgccctccagaatgttggcatttcccacaaaggtggccacatagctggtacggggatgattgtaaacctcatccggcgttccgatctgctcgaaccggccctgattcatcaccacgatccggtctgacatgttgatcgcctcctcctggtcatgggtgatatacacaaaggtgatccccagctttttctgcagccgcttcaactccatctgcatggcccggcgaagctttgcgtccagggctcctaagggctcgtccagaagaaggaccttaggattattcaccagggctctggcaatggccaccctctgcttctgtcctccagagagctcatccggctttcgtttttcaaagccttcaagctggaccagctccagcatccttgctgtctttttcttgatctccgcctttggaaccttccgcagtctcagtccataccccacattttcttccacggtcatatggggaaaaagtgcataattttgaaaaaccgtgttcacatccctctggtttggctccagccgggtcacatccctgccctccaggaaaacctttccctcgtccggactctccagaccggctatgatccgcagtgtggtggtctttccacagccagaggcccccaggaaggtgataaattctcctttttcaatggccagactgatgccgtccagtacatccacaccctccacaaatctcttttttatattttgtaactctaacagaatctctcccattttctctcctatttaatgttcttcaatataccgacagtactgttccttattaaaaaccggccgaaaatcctcaatgatccttttggcctgggctgcttcctccttcaaaagcccgtagacggtcagcgccagcattttggcaggctggatataggccttctcttcatcaacaatggaaaaatccggcccatgaagagttccggcaaagccgccaaaggtaaagttcaccactggaaacaggtggctgatatcgcccacgtctgtgcaggcattgttaaaatccccgtccttcacaagccgcgcggacgctcccagaacctgggctgcatggatcagggccgggtctgcctgcctgggcaaaatgggaagatatccggtgactgactccttggtgatccttcctcccagcgcataggccgctcctgcaaaggcccggtctactttgttgtgtacatccgccagtccctccagagaggctgccctcaccttggattccacaagcacatggtccggcacactattgatcaccgttccaccggaacggataaggtggtggatccgcacatgctcttcctccggataggtctccctttgaagtgccaccagattcagggcggctgtggctatgttcagggcattcacgcccttccagggggcgatggccgcatgggccgccttaccctcaatggtgatcatactggcctgatagccgttgcaggctggatttcccagatacaggtcctccttcaccggcaccatatgtacatgagtggtcatgaccagatctgtatggtcaaattcacccagacggatcaactcggacttgccgcttcccggaaagcctaccccctgctttctcagttctctccgcttctcataatcaatatattcctccgccggaacggcaaaaaaagatacggacccagacagagaagctttcacttcctcattggtcaatgccaatgctgcgccgatcatggctgcaagctgtgcgtggtgtccgcatgcgtgtgctacatttgtaacaaaatcagccattgggtgtccagcgcagccaatggcgtccatttctccaagaaccgtgatgtgtggtccatcctgttccatccaatctccccgcacgcctgtgcgggcaagtcctgcccggatatttaagcccaaagcgcccaaaaattccgccaccttggccccggttctctcttcctggaagcccggctccggatgagcatagatatcctgggcaaaatccacgatcaactgcctattttcatcaatcagctttatgatcttctcttccacacgatccatgttctcacccctttccggttattcccttatccttctataggattttccatagttctttaatcttaccataaaaagccttgtttgaaaataatatttttttttctatttttgccgggaatttatattacaaatcttaaagactggtttatcatgaggataccaaggtattttgactgctatccaggccttgggaacaatttttctttcttatgctgataaaaaaactgataaaaatatcaccgaaataaaaaatagttgttgattttttctcagaattcgttataatagtattcgtgcctggcacatgctggaatagctcagtcggtagagcacttcactcgtaatgaaggggtcgagagttcgagtctcttttccagcttatgacaaaagtaccacaatctcagtgtttacaagggtttgtggtacttttctctatttaaaatcaaaagaatatttttagaaaaggtagtttaaaaaagcaaaaaacgtgtaaaatggcaagatattttggtcagaaaaaaggcgccaaagacgcattaacacttggattgcaggatgttgtcaattaaaatcaggttgccaaaatccatgtatggatccggcctgctgcccctgcggtgccggtggttctgcgtctggttccgcgaataactgcaggttcatgggcaatgttccgttcttcataattccttctgttttacagttttatgagtgtctcacaagacagttggttacccggtgtctccgtgtagtttaaggccttcaggcgcaaaaataagacgcaattgtttttatactatataaacgtaacttgaatggggttatcacgctttaaaagatattcctccgaaaactcggacacttatttgtaaagaagggcatatcggcaaataatactatatatagcaccaattattatctgcattgctatataataagtttatcaacctattacaaaggagggattcaaatgaaaaagaaatttgctactttaatcatcgcctccgctaattgcttatcttccaccagtgcataggcaaaaatatttctctcacacttccagcaggatccgatatgtcaaactacccaaagaggaaataacggagtaaccaatgacgatggttccattacgtatactatactctaaaatttatacacgcagataccaataaagaaatctcttccacaacctataaggaaagtgtgaaggatttggattcctggagactgggtatgacatctgagtttcaggatcatcaggggcagactacggataagacacccatttgggaatttacattttcacctagcgaataaagaacaaagcggacaagtatccgggactgctactaaaagactaacagctccacaacctgtaaatactctctaaagaaaggaagtgtcgctatgccattaccaaacaatagaccgtatacatccaaggattactggaacctgccagaaggtcagcgtgcagagctgatcgacggccagctttatgatatggctccgcctaatcgtctccaccaaaagctggttatggaattctctgctaccatccgggaacatataaaaacaggtagaggggattgtgaagtgtatcccgctccttttgccgtaaatctcactggcaatgataaaacatgggtcgaacccgatatcagcgttatttgtgacaaaaacaagctatccgaccgaggatgcgagggggctcctgattggataattgaaattgtttctccgagtacacaggccacagattacggaattaagctttttaaataccgcactgccggggtaagagaatattggattgtaaacccggcaaaaaaaactgtcaatgtctacgaccttgaaaatgacaccgctacggcacagtattcttttgatgataagatcccgggcaacgtctattccggcttctttattataatttctgaattaattaaataaaacaccactttacaagttttacaaatgccagcattgttcctgaaccagctgtttcaaagcctttataatacctttggattttatgctggttacggtattttgcacgaaagtagcaaaaaatacctgctgccggatctgttcacttagaaaaaaacggaattcctgcacgctttcttcacggtattttgaaaatgcctcatcctgataaggcagtatcttcatggcgctgtaagtgatgttgatcaggttgaccagcatttcgatccctttatgactccgcaccatatagctgcataatgaccagaatgttttctgctcatagtagctaatttctatgttccagcggaaaccataacagaacaaggggatgtatttcatccagccgccccctgtctggtttaaaggtgccttctcctgccatgcacagaaaatctgcatctgctccggaaaaatggtactgaaaaataggcgtctggaaccgccctctttctctgtggatgtgacataggcaaggacttcccttccactaaaaatatttgtgaggacacggcgtacacctgtgtaataatccccaatcttttcgtcggacagacagaaatcctctttcagtgaaagacgtttcccatgcttggcaggacggccccttttgccggtccgctgcggcgccaggtcgtaaatgacagagtcataccgtgcattacagatgaggtccagatccggatattcatccacaacgcatgtgagatttttcttggcataccagctgtcacacaggaggatgacattcctcttccctgaaaaggtgggcatagtctgacgcaccatagacgcagcaagctccagcttggtctcatttttctgccacatacggtagccaagggggacagcaaggtagacgatcctgctgttcttccatacagggatgcagagcataaggctgacaaagcagtgcccattcaggtaattagagccgttatgagctgcatggtcaaaaagcttcgacacatcctcgaattttttaccgaacttggagaccatggtgtcgtcaatacataggaacacgggctgcagcttcaaggagtcagggaccagctttaaagccatggatgcggtcacattcatgaagcgggaataatccactttagcataggaacaggcgtagtaaaaagcgttaagggatttttgtgttatgcctgataaaaaatgccggtaaaggaaccggatggaatgagcggattccatagccaggatggataaaaccagcaggaacagagtctcggcggtcggtgcagaaaaagtttcaaaataaataaaaaaatattgatgaagtctaccaatcaggttcttttcgttgtataataagtttgtcgtacagggtcactttccttcgtatattttgttggcaaacttattatacaccaaagtgctctgtacggcatttttttgtgaaaaagttgtaaagtggtgtaaataaaatacagaaatgacaaatacttaaaaaccggcccctgtgccaacagagaccggcctatatctccgaagagatacacatattaattcgcagttaacattgtatcatctccggaggcagctatccagcatttggggctttacagccccacttgctttaatattgcctgctccaaccctttttccattggtttggaatgataaggaatgatggtttcgttccgtttaaaaaccatcaatctattcttcttttctcaacaaacttataactgtcaatacggtgatcgtgctggcaatcataagaacaaatccaaacacgaaccgcatggttctgctgtactctccagaagacagcagcccgaaacctattgccgatgatagagacaccaaaataatgtctacaattcccaaaataattttcgtttttcttttcattttaacacctctccctaatttttatttttccactggtgacattttacaaaactaaaacattggaaactaccatatacaaacttaaattatttcaccactatcttcttcaccgcaccaaaagagctgtataccttcctgttatttaccacgcggtatgcccttacttttacgtaatagaccgtattactcttcagtcctttaaatgtataagccagggctttcgtatccgcacttttgggggattttgtaaatttcgtatcctgtgctgccataatctcataaccagtagcaccggcagtggttttccattttacagaagcctgagtttttgcattacttttcccataggtgatggaaggggcaaaaagtacggctttcttttttaccgcaggggagaaactgccgtagtaattctttccatcctttgtgagataagcccgtaccttgtaataataattggctcccgttgccacggtaaggcttttggaggtttgacgcaaattcgttactcttttatagccgctgtctgcctttgtgctgcggtaaatctgatagccggtaacaccggacactttattccaagagaggtacaatttattataggcagtctgctttatgttcagcttctttacctgggcaacctttggcttgggttcttccttcacagacaaagtactttctcccaggggataacctgccatatatttacgcaccaggaagccattgtaattatcatccttataatcttctctccctgccaaaagcgtgttcgtcgtataatccaccatataccatttcttattaatctcaatcatattaaatgcatgacatggctctccacgattatatgctccgctgacaatataggatggaatgccggccagctccataaacctttggatggtcgcggcataagtcgaacagacgtatcccaccccattcccaaagagagcaccgtaaataccattacaatttctggggtacccattattggatgatttttccggtggcagcgttctttttaagtaattatagatataaataacctgatctttttttgaacggccacttatcttggagaggatgcttttgattttctggtcaacctttttcatctcctccgtattatcatgatagctaaaaacaattttataataaccatatccagaattcgtggaatccggcacgaatttttccaagaccatatatggatcaccttctgaaactatataatccagcgatggcccggaaaacacatcatattccatggagttatacaacccaccaacataaccatagtcaaaatagttataaatggaagaatgaagatccatttggtcttcttcttcgttctcaattcttaccttagaaggattcgtataaatcaaaatctcttcccggtgctctgcccttgcttttttcagcagctgaacaacttgggcttttgtccccactttcactgcctgtgaaaaatccacgtcgtccttcattgtgagagcagcctttggctgaatttgagcagcatctacaaaaatattcaaaaataccaacactgccgcgatcagcatacctttaaatatcattttctttttcataccacattccccctccctaatctttttgccataaataaattatccacccctgcttcacttctcacgtaataaaatacatagctccacagccgtatacgcatatctttacttacagctttttatagatatacactaacacacttttccccttgtcacaatagctaaatatatcccttaagacgttttttcttcccaattttaagacacatggataaacctaaaatagaatttgaccaagtatacaaactgttgtaaaattatatacaatgaagtgattcataggctgcttcacatgaatccccccaatctataaccggctgactttctggcatttctcagaaaaaggcctctctacgattatagataaatggataaattcacgaaagaatgaaatacaacggaggtatcaaatgaaaaacgaatggaaattcgcctttgtgcagacaattccagtactgtgcggctatatgttccttggaattgcctttggactgcttcttcagcaggcaggcatgtccgctctttgggcgtttctgatcagcacctttgtgtacgcaggctccatgcagtttgccttagtggggcttctcagctcccaggcggctctggtgtccgtggccctgctgactttaagcatcaattgccgccacattttctacggcttctcttttattgagaaattcaagtccatgggaaaggcttacccctatatggtgttctctctcactgacgaaacctactccctgctgtgctccgtgcaggtgcccaagcatatggatgaaaaccgggtaatgttccgtatctctttgctggaccagctgtactgggtggcaggttctgtgctgggaggccttctggggcagttcatcccctttgacaccacaggcattgactttgccatgactgccctctttgtagtaatctttgtggaacagtggctttcctccaagacccatcttcctgcagccatcggcctggcatgtgccgtgatctctttggtgcttttgggaccggaccagttcattctacctgctttagtgtccagtgtaatactgctgcttttctttaaaggaactttatccaagaatgaggaggtgctctcatgaataccgcttacctgttaaccgccatcggcgtatgtgccttgtgcacagtttttaccagagttgtgccttttttacttttcggcggtaaaaaacagccccccaaggtaatcacttatcttggaaagctgcttccctattccgtcatggcaatcctggtcatctactgtttaagaagtgtaagcttttctcatacatatggctttgtcccccaattggcaggagtggccgccaccgtcctgctccatttgtggaaacgaaacaatctgctgagcattgcaggaggaaccattctctatatgttcttaatacagtcggttttttaaagccggctgccaaagaaacacagccagatttgtgatgctctgcgaacctttgtgcgtaggcttggctgaaaaagtaatggcacgaatggatgcgtataaaataagaagctgggactgtaattccagaaccttatattttttatatgttgttgcggaaatatatattcaggggcatgcgtaaggaggaatattatgacaacgaaaaaagcgtatcctattatcttacaacaaacagatgatggatattatgtaagaattcctgattttgatatcggcacacagggggattctattgcagatgctatggaaatggctagagatgcaattgggttaatgggtattgatatggaagatgatggaaaacaagttccagagccatatacggaaaaatatgaaattgaaaaagatgatatcgtaacattggttgatattgatttttcagaatacagaagaaaagttgataacagagccgttaaaaagaattgcacgattccatattggatgagcgtagaggcagacaaggctggcataaactattctcggcttttacaggaagctatctctaattttcttggaattacaaaagcaaattgttaacgaaatctcattttataataagagggtacctgacaaaagccaggtgccctctctttgcccgaacatgcacagcatagcttagtagtacagtgcacgcaccctcacctatctcaaacgatctacttcccaataggcccttcttttacatgaatatccacctgtggataaggaataacaatacctgccttgtcaaaggccagcttaatctcttcattcagcctccatctggccctccaataggcatctgtggggacccaggcacgaaagcccaggaccacggaggaatcccccagggagtccacaaagaccaccatctcctcctgggacagtatatccggatcctcctttaaaagtccgttgagcaccttcttagccagcctcagatccgattcgtaggagatccccaccttgatctccagctttctgcgctcctgtgccgtcacattggagatgctgctattgctgagagagccgttgggaatgacaattttcttattatccacactggccaaggtagtataacagatctcaatccttttcaccgtgccctcgcagcctgtgccatgatccacgatatagtctcccacctgaaaaggcttgaagatcaagatcatcaccccgcccgccaagttggccagtcctccctgaagaccgataccgatggtaagcccggcagagcccagaagggctgccaccgtgctttctgtcaatccgaaattggtgccaatattaaagataagaattccataaaggattatattgcacagggagcttagaaactggatcactcccatatccaccctggccctctccagggatttgcgcaggaacccaagagcccaccggatgatctttgtccccacatagaacaccacaagggacaacaagaccttcagcccaaaagccgtgatctcaggaagatagcgctccatccatttttcccatggtatcatttatctgccgtttcctttccctttctccctgccggcttttttgcagggatctttgtctcctgctcctgaatctcttcttccaatatttttttcagattcttcttttctgagcctgtgttggcttttgccttcttattgtccgccagctgcttcacttcctgggtgcaggtgaaaatacagcagcccagggccgggaccttgatcttaatggaatgggtgcgttcatcacactcttccctgcgggccattttcaccctgggattgatcacccctgccccgtcgaatttcttattgtcactgtttaaaatctccttatattttcccggaaaaggcacgcctacgcgatactcttcataaggagcagaagaaaaattacacaccaccaggatggtttcctggggcttttcggtttttctcaggaaggagatcacattctcctcatatttcataagctggagccactcaaagccctggggctggtcgtccatttcataaagtgccggctggctgcggtacagctttaacagctcctgaagatacaccttcatctcctgggggagcaccgcgtccggggcaagcatcttcttaccgggatgagtcatgagatatccataggctgcacgcaccgtggccagcttctcctccctggaccctggaagcttttccataaaagtctcaaaatcacccacgtctctggtgccaagggtgagcacgtatctctcacagtaggcatagagcatggacaaggtgagctggtcatggatggttccgcgctgccttggttcatgggacagataatccaggaaatctgtggtccagcccccgctccatttatagtcaaagcctaaatggtcattttccacactgtctgtgatctgaggccacagtccgtcctcctgggcaataagcactgcatggggcacctgcttcttcacaatggaatttaaatgtttaaaaaattcaatggcctccaggttttcattggtgccgtacatgttgggtgtccagcagccgtcccctcttccataatccaggtagagcatacaatccacatcatccatacgaagcccgtctgcgtgaaattccttcagccaaaacagtgcattggcgatcagaaaattctttaccatggggcttccataatcatagagaagagttccccatttgggatgaacggccatggaggggtcctttctctcataaagaggggttccgtccaacagctcaagtcctgcctcatgccgtggaaaatgagagggtacccagtccaggatcacacccacgttctcctggtgcagacgatcaacaaaggccataaaatcctgagggcttccatagcggctggtgggggcaaaatagctggaggtgtcatagcctgcgctggcctcatccagatattccatcaccggatggagctccacatgggtataccccatttccttcacataggcagcaagctcaccggccatctcctgataattcttaggctcctctccctgccatttggccaggtccgcctcatagatgctcatgggcagagcttccgtgccctgctttcctctttcatggatccacttatcatccttccagtcataggtgctccttgtgacaatagaagcagttcccggggctgtttccgcatactgggcataggggtctgcctttagatgcacctccccgtcccttctcttaatctcgtatttatagtagtccccttccttcacatttggaacaaacaattcgaaaattccggacataggcatgcgatgcatgggatatttccgtccgtcccagccattaaaatcacccacaacactcacccgcagggcattgggtgcccacagggcaaagcaggtgcccgccgtcccgttcacagtcatgggatgggctcccagcttcttataaacatcataatgaacgcctgccagaaaggctctctcatcttcctctgtgatctggcagggataggcataaggatcataatatacctgagtggtgccgtcttttttctcaacctgataggaatacaccgggacctttgagcagggaagaagtcctgcgaaatagccttcctcttcctcctgctccatgggacagagctttccggtcttctcgattttcacaaaaacctgtgcggcatccgggaaaaatccctgcaccagaatctctcctcccaccagtcttggggccatcacatctctgggagatgcctcctccccatagagaactgcctcaatccggggccagtccattgcgtcataaattttgttttccataagtaaatccctcctgcctgtcatattctgtacacttgtttttattttatcattaaacctgtactttttccaccgatttaacaagttttccatttgacaaatatagattgctgcgataaattaaacgtaagactcagattataataaaggaggaccttactcatgtctgaaaaaacatatgatgtgacagctcttggagaacttttaattgactttacggaaaacgggaccagctctcagggcaatcccatcttagaagccaaccccggcggagccccctgcaatgtactggccatgctggaaaaattgggaaagaaaactgcatttatcggaaaagtgggaaaagatatgttcggcacccaattaaaagccgctgtggaagaggtggggattgatacaagagctctgatttttgacaaggacattcataccactttagcctttgtacatacctaccctgacggggaccgtgatttttccttctatcgcaatcccggtgcagatatgatgctaaccaaggatgaggtggacgaggatttaatccgttcctccaagatcttccattttggcactctctcctccacccatcctggtgtgagagaagccacccgccatgccattgaaatagccagagaaagcggagccatcatcacctttgacccgaatctgcgccctcctctgtggaaagatcttaaggatgccaaagctgagatcgaatatggcatgaccaaatgcgacctgctgaaaatttctgacaatgaagtagaattcctttttggaaccacagactatgacaaaggtgctgccctgatcaaagagaaatataacattccccttgttctcatcaccatgggaaaagacggaagccgggcctattataaagacatcaaggctgaggctgcccccttccttcaggaaaacaccattgagacaacaggggccggagataccttctgcgccagctccatcaactatgtgctggagcacggcctggaaaatctcacccaggaaaaccttgtggagcttctcacctttgccaacgccgctgcttccctgatcaccaccaaaaaaggcgctcttcgggtaatgccgggcaaagaagaggttctggacttcatcgcctcccggaaataaagctttgtgaaaaagccattgtccccggtttttggacaatggcttttttctaattctgcagttataatcttttttcaatgacctgaagcaggctggcggacacatggcccagctttcctctgttccggtacacgcttcccagcatcttttttcttttcttaaattttctggcaaaaggcggcagcttggagactgcccgttttttccagacagtgggaagctttttcaaattccggaagctcttcctcaggtttttaaaaaatctttttatccctttgatctttttgatcaattggttcagaattttctctatcttcatgactgttccttattttacaatacgtaccttagccacaccttccactgcctgaagctcatccaaggcctctctggacaccgtactttccaggtcaatgagggtataggcatattctcccttgctcttgttagtcatatcagcaatgttcaatccctctgcgcccaggatctttgtaaactgcgtcagcatgtttggtatgtttttatgggtaatggcaattcttcctactgccacgcatacgcccatatcacagttggggaaatttacggaattcttaatatttccgttttccaggaaatctctcacctcctggacagccatcacagcgcagttctcctcagattcctctgtggatgcacccagatggggggttaccagaatattgtctcttcctgctacggtactgttggcaaagtctgtcacatattttttgatcttgcctgcctccagggcctggatcagggcttcctcgtcaaccagaatatctctggcaaagttcaggatcaccactccatccttcattttctccaatgcttcctggttgatcatcttcctggtgctctctgtaaggggcacatggatggtgatgtaatcgcatttggtatagatctcgtccaggctctttgcatggtggatggtgcgggacagattccaggcagcgtcaatggagatataggggtcgtatccataaacctccatgcccagcttgctggcagcatttgccaccatggttccaatggctcccagaccaatgatacccagacgttttccggaaatctcacagccggcgaactgttttttcttcttctccaccagcttatcaatctccgcattgtccttctgctgagccacccactcaataccacccacaatgtcacgggaggccagaagcatgccggccagaaccagctccttcacaccattggcatttgcacctggtgtattgaatacgacaacaccccgctcagagcattttcctaccggaatgttattcactcccgctcctgctcttgcaatggcagccacactctgtggaatctccagatcgtgcatctttgcactgcgcactaaaatggcatctgctccttctaaatcgtcaattcttttataatcgtctccaaacagttccaatcccctatctgcaataggattcaggcaatgataatgatacattagagattctcctcctcaaattttttcataaatgccactaaggcttccacgccttcttttggcatggcattataaatgctggcccgcataccgcccacggttctgtgtccctttaagttcacaagtcctgctgcggtggcttcttttacaaacttcgcatccagttccttgtctcctgtcacaaagggaacgttcatcagggagcggtccttaggcacaaccgtaccttggaacatcttgctgctgtccaggaagtcatagagaagctttgctttttcctcattgcgtctcttcatctcttccaggccgcccatggctttcagccatttaaacaccttgccgcacacatagatgcagtaggagttgggcgtattatagagggaacctgcatccgcatgagttttgtaggtgagcatggtgggagttcccggaagaacctcctccgtgatcagatcttctctcacaatagcaatgaccattcctgcagggccgatatttttctgaacaccgccgtagatgatggcatattttgatacatccaccggctcagaaaggaagcaggaggacacatccgccaccagatcttttcccttggtgttgggaagctctttaaatttagtaccataaatggtattattctcacagatatacacatagtccgcatcagggctgatgggcagatccgagcagtccggaatataggagaaggttttgtcctcagaggtggcgatcttattggctttgccatatttctgcgcttcctggtaagccttttttgcccactgtccagtgacaatgtagtctgccaccttgtttttcataagattcatgggaatcatggcaaactgctgggaagctcctccctgaaggaacagcaccttataattattgggaatattcatcagatctcttaaatcctgctctgcatcatcgataattttctggaatggagcgcttctatggctcatttccatcacagacatccctgttccctggtaatccatcatctcatcagctacttcttttaagacactttccggcaatacggccggacctgcggaaaaattataaactcttcccatctcttctcaaatcctcctcgtcaaatacttcatcaatgttcgcccctgctgccaccatggggaatacactcagatcctggtcgatccagcaatccagaacaatggggcctttggcttctagggcgcggcgcagggccggttccacttcctcaagctttgtcacccgtatggcctctgcacccatggcctctgccaccttcacaaagtccacgctgtcctttaaaatggtgtgggaataccggtggtcatagaataacgtctgccactggcgcaccattcccagcacatggttgttgagaacgatctggatcaaaggttttccacagcgcacggctgtggcgatctcattcatattcatccggaaacagccgtctccggcaatattcacaacaattttatctggtcttcccatcttggctccaatggcggctcccaggccgaatcccatggttccaagccctcctgagctgaggaaggttctgggctctttatatttataatactgggcagcccacatctgatgctggcccacgtccgttgtgatcactgcctcgccctgtgtgagctcatagagcttttcaataatgcaggggcctgtaagctgggtatgatcataattcaacggatatttattcttcatatctttgatatgggcgatccactggggatgctccatgggctggatctcttccagcaggcggcggagcacttccttgatatccccttcaatataggcatccaccaccacatttttgttgatctctgccgcatcaatgtcaatctgaagaatttttgcattttttgcaaaattcttggcatttccagtgacacgatcgctgaaccgggcacccagtacaataaggaggtcacactgagacactccataattggaggttttggtcccgtgcataccgatcatgcctgtgtacagctcatcctctcctggaaaagcaccttttcccataaggctgtcacacaccggcgcctgaatggtatgggcaagcttgtagatttcctgggaagccccggagatcacagaaccacccccggcaaaaataaagggttttttggcctcccggatcatttccagggcccggttcacagcctggggctgaatctcctgggtcacccggttaacagtggcagggcgtttgggctcatactcatatctgccccctgtcacatccttggtcacatccaccaatactgggccgggacggccgcttttagctatgtagaacgcttttctcacagtatcagccagattcttaatatcctttacaatataactgtgctttgtgatgggcatcaccacgccggcaatatccacctcctggaaggaatcctttcccagaagaggttttcccacgtttgcagtgatggccaccacaggcacagagtccatataagcggttgcgatcccggtgaccagattggtggctcccggtccggaggtagccatgcatactccaaccttgccggtggctctggcatatccgtctgccgcatgggcagctccctgctcgtgggaggtaaggatatgattgatctggtctctatattcatagagggcatcatacacatttaaaatggctcctcccggatatccaaatactgtgtcaaccccctgctccttcaagcattcaataataatttctgctcctgtcaaaagcacacaagattccccctctattcttttgtcttaggaatttccaggatggctccccggttgccggaggtgaccatggcggcatatcttgacagatacccggtggtgatcttaggctctctgggtgtccaggcattccttcttctttccagttcctcatccgataccttcagttccattttcaattcaggaatgttgatgcagatggtatctccctcttccaccagagcgatgggtccgcccacggctgcttccggtgaaacgtgtccgatggaagcgcctctggacgcaccgctgaaacggccgtctgtgatcagggccacactggacccaagtcccatgcctgcaatagcggaggtgggattgagcatctctctcatgcccggaccgccttttggtccttcatagcggatgaccaccacatctccggcaaggatcttgccccctttaatagcctcaatggcatcctcctcacagtcaaagactctggcaggaccttcatggaccatcatctcctcacacacggcggagcgcttcaccacacctccgtcgggagccagatttccttttaatacagcaaggccgccagtctggctgtagggattttcaatgggacgaatgacctggggatctttattcacgcagtccttgatgttctctcccacagtctttccggtaacggtcatacactctgtatggagaagtccttttttattcagctcgttcataaccgcgtacacgccgccagcttcattgagctcttcgatgtaggtggggcctgcgggtgccagatgacacagattgggtgtcttctcactgatctcattggcaaagctgatatcaaagtccattccaatctcatgggcaatggctggcagatggagcatgctgtttgtggaacagccaagggccatatccacagtgagcgcatttaaaattgcctcctctgtcataatgtctcttggacggatattttttctatacatttccataacctgcatacctgcgtgctttgccaggcggattctctcggaatacacagcaggaatggtcccgttcccctgaagtcccattcccaggacttcggtaagacagttcatactgttggctgtatacataccggagcaggagccgcaggtaggacaagtcttcatctcacactctgtgagctcttcctctgtcatatttcccgccgcataggcgcctacagcctcgaacatactggacaggctggttttgtgtccgttgagatggcctgccagcattggtccgccgctgacgaacacggtgggtacattgatcctggccgctgccatgagcaggccgggtacattcttatcacagttggggaccatgaccagggcatcaaactgatgagccagggccatagcttctgtggaatctgcgatcaggtcacgggttaccagagaatatttcattccaatatggcccatggcaattccatcacacacggcaatggccggaaataccaccggcgttcctcctgccatggcaactccctgttttactgcctccacgattttatccaggttcatatggcctggtacgatctcgttgtaagagcttacgatccccaccatggggcgttccatttcctcctgggtaaagccaagggcattaaacagggaacggtgaggcgcctgctgggaacctttttttactgcatcacttctcataattatgcttcactccttctatatagaaacaattccaatgattccttatttttcaatagctgctgcaatgaggctgcccatctctttcgttccaacaagcctgcagccctctgacagaatgtcgcctgtgcgccatccctgggtgagaaccttctgcacagccgcctccacagcgtctgcctctttatccagatccagagaatagcggagcatcatagctgccgacaaaatagtggcaatgggatttgccttatcctgcccggcaatatccggtgcagagccgtggcttggctcgtaaagtccgaattttgtctcatttaagctggctgaagaaagcattccgatagatccggtcaccatgctggcctcatcagacaaaatatctccgaacatattttctgtaaggatcacatcaaactgccccgggtcttttacaagctgcatggcgcagttgtccaccagcatatgctcaagagacacctggggatagtcctttgccacttcctccaccacacttctccacagtcttgaggagtccagcacgttggccttatccacgctggtcacctttttcccacgcttcatggcaatatcaaaggccttgatggcaattcttctgatctctgtctcgtcatagctaagggtgtcaatggccttcctcaccccgttttcttccactgtcctgcgctctccgaaatagaggccgccggtgagctcacggacaatgatcatatcaaaaccgtctccaatgatgtcttcacgcaaggggcacgcttccttcagctcttggtacagataagccggccgcagattggcaaataaatttaaggccttgcggatggccagaaggcctgcctccgggcgctttgacggctccagctgataccagggagaggttttggcatctccgccgatggagcccatcaggactgcgtcagatgcttttgcagtttcaatggcctcctgtgtcagcgggactccatgtacatcaatggacgatccccctaacagaacctcctcgtatgtaaaagaatggccaaatacctggcacaccttatccagtacttttttggcctcaccaactatttccgggccgatcccatctcccgggatcaatgaaattctataattcatggtttcctttcctttcttctgatagggtattgttaatataatactctacttttttcgagatttcaacctattaaagtgaaaaatcgttaaaagattcacttggagaaacctgtctgagaactttcctaggtaataaaaaagccggcttttacgccggcttctaaattaagcatttgcttcttctgctttttccacttctgcaatggcagcttttctcatgggaattctgcaatttttattattgccaaattccacaatgacatcttcatcagtcatatcaatgatcacaccataaaacccactggtggtaaccacgctgtctccaacctccatggcactgagcattgcacttactctcttctgctctttcttctggggacggatcataagtaaatacatcactccgaaaatgacaaccatccagatcagggtaaatccaatacccattccgcctgcggctgcgctgtctgcggctgctactaccaaattcatatttcttcctcctattactgaactttccattgcccaaaggcactacagtgtatcatacacaaaatttcttgattcatcaagtggttttccaatttttctttttatttcatgatttcagaatttcctgcctgaaaaccggccagcttctcttttttgaattctgcataccttccctggtccagggcttcccggatttcttccatgagatggttgtagaaatacagattgtgcagcacacacaggcgcatacccagcatttcctttgccttcagcagatggcggatgtaggccctgctgtaatggcggcaggcgggacactgacagccctcctcaatgggccgggaatccagctcatacttggcattaaacagattcagcttgccatggtttgtatatacatggccgtgacgtccgtttctgctgggatacacacagtcaaagaaatccacccctctgtccactgcctccagaatgttggcaggggttcccacccccataagataggtaggtttttccttgggcagatgaggtaccacctcatccaggatccggtacatctcctcatggctctcccccactgccaggccgcccacggcgtagccgtccagattcagctctgcgatctgctgggcatgggcgatccggatatcctcatatacggccccctgattgatcccgaacaaaagctggtccttattaatggtatcctccaggctgttcagccttgccatctcatctttgcaccgcaccagccaccttgtggtccgctggacagagcgttgcacatagtccctgtccgccacgctgctgggacactcgtcaaaggccatggcaatggtggaggccagattggactgaatctgcatgctctcctccggccccataaaaatcttccggccgtcaatgtgcgagttaaagtacacgccctcctccttgattttccgaagccccgccagggaaaatacctggaaaccgccggagtctgtcaggatgggcctgtcccacaccataaatttatgaaggcctcccagctgtttcaccactttgtctcccggtcttacgtgaagatgataggtattggaaagctccacctgggttccgatctctttcaaatccatggtggacacggcccccttgatggccgcaacggttcccacattcataaataccggtgtctggatggttccatgtacggtttcatactgggcacgcttggctcttccttctgttttcaggattttatattctgccattgctaaattctccatttcttaaatatcatgttcttaaaaatcaagctgtcaaactgcctgcgtacagcgttctcttcactggagaccgttgtgttcccactgtgtgagacaaaccgcacaccgtcccgtatacagaggcattttccagcactatagagcagtatacatggagatggtttggttttcaagaaaaacattgtaaacatttgacattgccaactttccattcctgtcgtataataaaaggctgaaatcgcatttgtacttatttaatatatgtcatcaaatatgtgaattcagtacataaatcccttattctcacaagataaatcataaagataccgtaaggaggcaactttttgaaagaatatactttaggaatcgacatcggttccactaccgtaaaaattgcagtcctggatgagacagagcagcttctgttcgctgactatgaaaggcattttgccaatatccaggagaccctggcagcccttcttcaaaaggcccaggaccagttgggcgagctgacggtccacccggtgatcaccggctccggcggcctgaccctggccaaccatctccaggtaccctttgtccaggaggttatcgctgtatccacctctttggaaaagctggcccccaaaacagacgtggccattgagctgggaggtgaggatgccaagatcatctattttgaaaacggcaatgtagaacagcgcatgaacggcatctgcgccggcggcaccggctccttcattgaccagatggcatccctgcttcaaagcgatgcagccggactgaatgaatttgccaaaaactataaggccctgtaccccatcgctgcccgctgcggcgtgtttgccaagacagatatccagcctctgatcaatgaaggggccaccaaggaggacttgtccgcctctattttccaggctgtggtcaaccagaccatctccggccttgcctgcggcaaacccatccgtggccacgtggcctttctgggagggcccctccatttcctgtcagaactgcgccaggcatttatccgcacgctgaagctggacgaggagcataccatccttccggaaaactctcacctttttgccgccatcggctctgccttaaacgccaaggaagacacggtggtctcccttactgccatgaaggaccgcctggcctccagcatccatctggattttgaggtggcccgaatggaacctttatttgcctctcaggaggattatgagaaatttgaccagcgtcaaagctcttataatgtagccaccgctgatctggaatcctatgagggcaactgctatctgggcattgacgcaggctccaccaccaccaagacagccctggtgggagaggacggatccctgctgtattccttctacagcaacaatgacggaagccccttaaaaacagccatccgctccatccaggagatttattccaaacttccatccagcgccaccattgcctattcctgctccaccggatacggagaggccctcatcaaggctgcccttatgctggacgaaggagaggtggagaccgttgcccactattatgccgccgccttctttgacccagaggtagactgcattctggatattggcggtcaggatatgaaatgtattaagatcaaaaacaaaaccgttgacagcgtacagctcaatgaagcctgctcctccggctgcggctccttcattgaaacctttgcaaaatctctgaactacagtgtacaggattttgccaaggctgccctgttcgccaagcatcccattgatctgggcaccaggtgtacggtgtttatgaactccaaggtaaaacaggcccagaaggagggtgcagaggtttctgatatttccgcaggacttgcctattccgttatcaaaaacgccctgtacaaggtgatcaaggtctccgatgcctctgagcttggaaaacacattgtggtccagggaggaaccttctacaacgacgcggttctgcgaagttttgagaaaatcgcagactgtgaggccattcgtccggacattgcagggatcatgggcgccttcggggctgccctcattgcccgggagcgctatgccacggacaaggaaacctccatgctgtccattgaaaagatcaacgccctgaaattcaccacctccatggccaactgcaagggctgcaccaacaactgccgtcttaccatcaacaaatttaccgggggaagacagttcatcagcggcaaccggtgtgagcgtggaatcggaaaggaaaaaaataaggacaagatccccaatctttttgaatacaagtataaacggatgttttcctaccagcctctgggaccgctggatgcttccagaggaaaggtgggaattccccgtgtgctgaatatgtttgaaaactatcccttctggttcacctttttcacagagctgaaataccaggtggtgctctctcccacctccaccagaaagatttacgagctgggtattgagtccatccccagtgagtcggaatgctatcctgccaagctggcccacggccatgtgacctggctgctgaaaaacggggtgcgctttattttctacccctgcattccctatgagcgtgtggagttcccggatgcagtcaatcattacaactgccccattgtcacctcctacgcagaaaatatcaaaaacaatgtagatgaactgaacgacccgtccattacctttaaaaatcccttcctgtctctgacttcagaggagacagtcaccagccgtcttgtggaagagtttccggacctgcccgctgcagaggttacggaagccgcccacaaggcctggctggaaatggaagcctgccgtgaggacattaagaaaaagggagaggaaaccctgcattacctggaggagaccgggcgcagaggaatcgttctggcaggacgcccttatcacattgacccggagatccaccatgggatcccggatctgatcaacagctatggaatcgccgtattcaccgaggattccatctcgcacctggctgaagtggagcgtcccatccgtgtaaatgaccagtggatgtatcactcccgcctgtatgcagccgccaactttgtcaagaccagggacgatctggatttgatccagttgaactccttcggctgcggcctggatgcggtgaccacagacgaggtctacgagattctggacaacagcggaaagatctacacctgcctgaaaatcgacgaggtaaataacttaggagctgccagaatccgtgtccgctctcttctggccgccctgcgggccaaggaagcccagcagcagacccgcaccattgtgccctcctccattgaccgggtgtccttcaccaaggagatgcgcaaatcctataccatcctctgcccacagatgtctccggtgcatttctccatccttcaggctgccttcaatgcatccggctaccaactggaggtgctgcccaacgacaacaaagaggcagtggatgtgggactgaaatatgtaaacaacgatgcctgctacccctccctgatggttgtgggccagatcatgcaggctctgctgtccggaaaatatgacctgaacaaggttgccattatcatgagccagacaggaggcggctgccgggcctccaactacattgctttcatccgccgggccctgaaaaaagccggtatggagcagatcccggttatctccctgaacttaagcaagctggagagcaacccaggctttaaactgactcttccgcttatccagcgggcagtctatggggcagtgttcggagatatccttatgaaatgtatctaccgcatgcgcccctatgagattgacaagggttctgtaaatgccctacatagaagctgggaggagcgctgtatttcctttatcaccagcggacatcccagccataagaaattcaaagccatgtgccgggaaatggtccaggattttgacaagattcccatcacggacgagaagaagccccgggtgggcattgtgggagagatccttgtaaaattccttcctgctgccaacaatcacctggctgagctgctggaggccgaaggagcggagcccgtggtaccggatctcatcgatttcctgtgctactgcttctataaccagaactttaaagccaaatacctgggctttaagcagtcctccgcccgaatcgccaactgggggatcaaggccattgaatgggcccgcagcgctgccaatgaagccctggcccagagcacacatttttcacctactgctaagattgaagatctggcaaccctggccacgcccattgtatccacgggcaaccagacgggggaaggctggttccttaccggagagatgatggagctgatccactccaacgtgcccaatattgtgtgcatccagcccttcgcctgcctgcccaaccacattgtgggaaaaggagtgatcaaggaaatccgcagaagctatccaagagctaatattgtggctattgattatgacccaggcgccagtgaagtaaaccagctgaaccggatcaagcttatgctttccaccgcccagaaaaacttaaaccgtcctcctgagtagaaataaaagaggcccgcttagatgaacgccgaaaaagaagtatcacaagtaaactaacttagcggctgacaaacaggattgcagaaagcgatgtgcatttttccaaagatacacatcgctgttctttttgatattccttacaaacaatcgaaaagttgtgatataatatcctatgtaagtaaagcgagtttaccgaaaggaaaaagagcatagagtatgaagaaagtaatcaattggattttattattaggaacggtcatttcaattatagttgctttaaaatattcttccttacctgtttggaatttcatgccagatagactatctgaattttggatatcttctatcgaagagcaacaagaatatgttttattatacgacattgctgttggttttatattaagcgcattgttctattttgtggtagaagaactaccagatagagttagaaaacatagagctaaacagctaattaatgtacaaataaacgaactacttgaatatatggaacaattaattagtatcgttatagcaaagtataaacgtaatgaaaatttaaaagaattagctcaaaaagactttttgattttggatggagaaaccagactttccatagaggaaatttcatatttaactactacctattatactaaaaatggaaaacgaaaaactgctattcatcagtatggaactgtcaacaaggtaacgaaagataatcttaaacacatacttgataatatatctctgataaaaaattatgaatacttttatgcatctgatagtctcttggttgaatgtatccgaagaattgagggttgtaaactggttaggtattattaccagaataatgatattctaaagaaaacaccttgctttcaattacaaggtacgagtactgcaatggtagaatttgttagcctttatttacagctgcttaaacttaaatttcatactgaatattccataactactcttgatagcaaagaagtgaccgaaaggtaccataatgatagagaaacaggtgcacttttacaaagtgtctttgatatacaaaaggaatggcaagaaattactactgcgaacccaactgtagttataagcagtaaaaaatatacaactgacatacttatttcccaattaaaacagaggtttactgcaacatattttttcatagatgagatacagaaagagagtttagaaagatttaaatttatagtttttgtagttgactctatatcgaaaaatgcagttattcgtttgttaaaagagtttgatatgcaagctgaaattcttttacttacagagagaaatattttttgtaatggaattaaccataaaaacagatacaataaaagaatagtttgtgaaatatttttcaagagttactttaaagttaaatatttgccagttgtattttataaagaagaaccttctgaaaaaagtataacagctatcgtgtcacaaatagaaaccattttttatggaaaacacaaataattaccgcatgaaataatctttcttacgttgagaatttgttttttacaaatgttataaattgtatgttacgcagtagaacgccacttttgagggtattttattaaaaccattatgctcttattgcatctgcgaagccgcataaatcaaaggaaaatcaacctctatcgcgtaacatacataatgaattgagaacgcaagcggtttatccgattacactctcttgacggctgtttttggctttgctatttgctatctgtcaaaacgaaacttgaagatagctgtataagctgtgctttcagacggtcttatatctcgtcattgattacccttggtacatagaaagatgctttatacgcggtgtgtcgtgctgcaatactgtatttattgctttctggctctctggcgacagctttttcaatgacttcaaaaggtatcagtttcttattcctcatgctctgttttctccatttcttttcttaactgtttcaatgcagcgaatttccagtagttgactgtgcttctgctgcgtccgtactcatttccaatttttgtatcggtatagctgagaaagaaatacgcagcacgcctttgttccggcaatctggataatgcatcggctaatcgcctacttgctacaataatctcttgtcctttcacaacaaagacagttggcttatcgtattgttcaaagtaacaatccattgtaaatggctcaagtggcgtttcggaaatcagatactcaagcgatacttcccgtctctgtttcctttcaaaatcgcggtatgcgttgattgccgcattgcggagaacaatattacaaaaggctgcgaaagtgtactcgatatgctccatgaattgttcagaacacttcatcataactcaccccctttcttcccagtagggggctattacaacaaacgcccatgtagcacaaaaccacatgagcgttcgggtaatatgagttgttaagacatattaaacgagctgacatttcatactgattactcatgacaggtttttgaaactgtctgccgagtatgaaacagagcaaaaagagctgacggattttgtcaatacggaacaaactgccgttaatacctacaaacagaatagaacggattttgacagcttcgccgctgttatccgcaagtatgtggcaatacgagaactgacacctactattgtcaatgagtttgtgaagaaaattattgtccatgcaccggataaatccagcggacaccgcaggcagaaaattgaaattgtctggaactttatcggagaactggaacaggtcgaggacaaacaagaccattgaatagtaaagaaaaagcagaacggcatagcttttgactatgccgccctacggtaatgaaattacttctttatgggtacgccgcttttcgcggaccccttttatttttcttgaatcttgtctgtcagcaaagatgaagctttcttccaaagcgcacgatcatgcttcctcctggtacatgggacatatcctcctcggtaggcttggtgatagccaggtaggaaataaaatacacaacaatccctaatccaatagcaaaaatcagctttatggcaagacaaatgctgatggaccctaaaacctttaagggcagcaggaaattcaaaagtgcatacacccctcctgcagccaccgccatggggatcgaggctaaaaatggtcccaggtaggcatatctccaaggattcttataatccagatacttcttcaaaaacaagtcatttaatacgcagatcagtaccgaatataccagcatggcaatcaccagggagtagattccaagatcggtaaataccagcagcaggatcaccacaacaatatctgccaccagggagatcgcagcattgagcatgggaatattgggctttccgattccctgaagcacaccattggaaatattggaattgctgttcaggatgatcatcactgcgcccacaagcatcagctttcctcctattccgttggacacggggaaaactagctgtgtaacaggtcctgccagcacggccagaccaatggctgcaggaatagaaataatcatactgatccaggtcgccaggtcgattttttcattagccagcttcttttcttttcttacataatgggctgaaatttccggcatcatggaggttggtgctgtactggccagagtcagaggaatattgatcaagatcataaaatatccatattccgcatacacaacctggactgcattgtcatccaacccccttcgccccatgatatctgtgaacataaagctattggcaaacccattcacattataaataaatgcactgaaaataatgggcattacaatgaggatcaaattcttcataaccacattgtagctttcatccagagataccctatctctacgaatccttctctgaatggttttccgattcacactatatacaaaaagcataaacaccaaggctgccagcacaccggctcctgtacccatggtagcgcccgcagctccccatctctgtacagcatcctctcccttatcctgaaatacccggatcataattccggacatgagaagagccaccactgccacaaagacctgctcaatgatctgcgacaaagaggtgggcatcatattccggtaggcctggaagtaacctctgaacacccctaaaatccccgaaaagaaaatggtgggagccagcacctgtaaagccaggcgggcatttgccatattctcaggaactaaaacagaggccccgaaaacacacaccaacgccacaaaacctcctgcagccactgcatacacaagggcggcccgaaagacccgctgagcatcccggtaccggtgaaaggccagcttttctgccataattttcgacaccgcctggggaatgctaaaggaggcgatcataagcaagatcagatacgcctgctgggcataattaaataatcccatggtatcattgcccaatgtagaagacagaggacttttatagagcatgccaatgatcttggctatgagagccgccaccatgagaaaggaggcatttttcactaatgttgtatcattcttttttttactcattctgaatcaacccctaaacattctcaatttgccagtctatgggctccacaccgttggccttgagaaactcattggtccggctgaaatgtctgcatccgaaaaatccccggaatgcggacagagggctgggatggggtgcctccaggatcagatgcctgggattgttcagcatactgcgcttcatttgagccggtcttccccacagcaggaacaccatgggacggtcctgctcatttaatacccggatggccgcatccgtaaactcctcccagccgattcctctatgggaattggcctgatgggcacgtacagtgagtactgtatttaaaagaagcacgccctgctgggcccacttttccagatatccgttatttggaatagagcagccgcagtcatcatgaagctcctgataaatgttcaccaaggacgggggaatctccacatccttttttacggaaaagcagaggccatgggcctgtccgtcattgtggtaaggatcctgtcccaagatcaccaccttcaccttctccaggggggtaaaatgaaacgcattaaacatatcctgggctggtggaaagatctttctagtacgatattcctgcattactttattatataactgggcatagtagggcttcctaaattctccctgcaatgcctccagccattcacctgaaagtgccggcattttaaattcaccttccaactttttttacttttcggttacttttcaggggatatgccgcaaaagaacagtcagcaccctgctgttctttatgtggccagcccccatcactgctacagccggacagagacgccccggtcttttagatattccttaacctgtctgatctccagctctttataatgaaacagagaggctgccagagctgcgtcagccccgcccttcgtgagggcctcataaaaatgaggaaggctccctgccccgccggaggcaataacgggaatggatacccggtccgccaccgccctggtcaattccaggtcataacccgcctttgtgccgtcacagtccatgctggttaacagaatctctcctgcccccagctcctcagctgtctttgcccactccagggcatccattcctgtgtccagcctgcctccgtgcttataaatattccagcccgtgccgtcagagcgtttcttggcatcaatggccaccaccacgcactggcttccgaacttatctgctgcctcactgatcagcttgggcctgtcaatggcagcggaatttactgagatcttgtccgcaccctccctaagaagtctgcggaaatcctccacactacggatccctccccccactgtaaaggggataaacacattggccgccaccttgcgcaccatatctacaacggtatctctgccgtctgaggaggctgtgatatccagaaataccacctcatctgcgcctgcggcgtcataggccctggcgatctccactggatcccctgcatcccgcagatccacaaaatttacgcccttcactactctgcccttattcacatccagacagggaataattctcttggtaaacatttcacaccgcctccttgtccagattggcaaagttttccaggatcttcagcccgtaatggctgcttttctctgggtggaactgacatgcgaacaaattccccttctccacagatgcatggatacaggtactgtaatctgttgcagccttcacaatctccggctcttgggccttcagatagtaagaatgcacaaaatacacataggctccctgggggattccctgaaacagtctgccgttattctgaagctggagggaattccagcccatatgtggaattttcagtccttcctttggcgggatcttcaaaatctgtccctttaaaattccaaggccctccaccccgggacactcctggctgctttcaaacaaaagctgaagtcccaggcagattcccagaaacggttttcctgtttctatgatatcctttattacaggaaccaaatcaaatttatggagattttccatggcatctccaaagctgcctacacccggaaggataattttatctgactgctccagaattttagggtccctggtcacagtggtctcctggcccagataagcgagagccttctcaacactttttatatttccggcgtcataatcaatgattgcgatcatgaagttctccttttttcattccaattttccatgtttcctcaattcacacctattttctagtatatcgcaaaaaaaggcggttgaaaagaataaattctcttctccgcctttttctgccctatgaactatttgggatccagagtaaaccagaattccacaccattttcataattagttacaccgcaggattgatgatggttgtccataatggccttcacaatggaaagaccaatcccacttcctccgtattccctggtgcgggccttgtccaccttgtaaaatttgttccacagattgggcaggtcctcctctggaatgggctctccggtattaaaaatacttacccgcacaggattgctccgttccaccttaatgacgatctcccgctccccagccatatgattcagggcattggtgaagaagttagtaatgacctcctcaatcttaaattcatctgcccacacatacactggagactgctcctcgaaaatcacacgggccccgccttgctggatcatcaatccagatttctgcagaactccctggatgacctctaccacattaaaccgctccatctccacagaatcctggccggactccaactggttcaaggtgagaaggcttctcaccagcttattcatctttccggcctcatccatgatcacgtcacagtaaaactcccggctttccacatcatcggagatgttttccttcagcccctccgcatacccctggatcagggcaatgggcgttttcagctcatgggatacatttcccagaaactctcttctctgttcatccatgcgaattttattttcaatatccttctgcaactcattgttggctgtcttcagctctgagatggtcagcttcagctgctgggacatgcggttgaaattatctcccagcacatcaatctcattgtgggtgctgctttcatatttcacttcaaaatccagatccgccatgcgcctggacagctctgtgagctcgctgatggggcgtgtgatcctcttggtgatcacccagatgagaaaaccgctgataaggataatggccgcccccacatagaaataaaagccgttggagatggcggcactttcccggatactctccagaggagagcggatcatacagtaattgccgttttgaaagattccccagatctccacatagtcaatcccccggaagctttcctgggtctgctggatcacataattgtcctctttttccagaatccgctttctggctctggaatcctccacgctttccaagccatgggtataaccaaaaagcctggcccccatgatcctggcgtcctcctcagagctgcactcctttatgctgtcccagctgttgatgatcacccaagtcagattctggttggagctgttccgcttccaatcctctgatatgtcctgtccactctcgtcataggtctccagcttttcaaaagcatttctgagaacctctttctttttggatatataatattcctccaaaaacaaaccgttaatgataacaatggccagaagggataacagcaaaagaccgataaagctgcctgcgatctgatttcttaaggcatgctgtctctttacttcctttcgtttcggcttgctcattcctctacctcaaatttatagcccataccccacacagttttaatgtattctcccttttcacccatcttgcttctcagcttcttcacatgggtatcaatggtcctggcatctccaaaatagtcgtaattccatacagaattaagaatcttttccctggaaagagcaattccctggttttccataaaataggtgagaagttcaaactctttaaaactcagatcaatggtagttccgtccaccgtcacaagatgggcagccttatcgatcacgatcccgcctgcactgatggtgtcacttaagcctgcctggcctgtacgccgcaggatcgcctccactctggccaccaggatcttggggctgaagggcttggagatatattcatccacccccagctcaaatcccagcagctcatcccgctcgtctcctcttgctgtaagcatgatgatgggcaccttagactccttgcggatctccctgcacactgcccatccgtccattttgggcatcatcacatccaggatcaccagagcaatgtccttctcctcgtaaaaaacatccatggcctcctcaccgttgccagcttccagcactgtaaaattcttttttgtcaaaaagtcttttaccagcttgcgcattctgctttcatcatccaccactaatatctttaaggaatccataattttcctccttcgtttccgttttatacttgtaatatagcagataaatatggaagttttgtgaacgaaacaaaggaaaagcagaaagtttttagcgtctgtacccagacagcatcctaagaaaatctccatgccaaggctgccgggtgtaaacacacaaggctttgtgaggaagtgtttttcctctttattttcatggggctttattgccacttggcagattctatgttacactatcaaaagcaaagttttccaacaaaaatggaaattgggatttatcaggaggataaaatgatggaatatcgtgttttaggaaaaacaggacttcgtgtgtcaagaatgggcttcggcggaatccccattcagcggattgacaaagaaggcaccagagaattaatgagaaaaatggcacaggcaggtgtgaactatattgatactgccagaggctataccgtcagtgaagaatatttaggctacgccctggaggggatccgcagccagttcgtggtggccaccaagagcatggcccgcacaaaagcggatatggccagggacattgagatcagtttaaaaaatctgcgcacagactacattgatctgtatcaggtacataacccctccatggaacagctggagcaggtcataggagcagagggtgccctggaggctcttatggaggctaagagcgcaggaaagatcgggcatatcggccttaccgcccattctgcccaggtatttgaaaaggccctctccctggactgggtggagaccatcatgttcccctacaacattgtagagaatcaaggcgaggccctgataaaagcctgtcaggaaaaaaatatcggtttcattgacatgaagcctctggccggcggcgccattgaaaatgcctccctggcccttcgctacatctgcgccaacccggcagtaaccgttgtgatccccggcatggcagaaatcaaagagctggaacagaacctggctgcctgtgaggatagctctcccctgacagcccaggagaaccaggagctggaggagattcggaagaccctgggaaccaacttctgccgcagatgcaattactgtgctccctgtactgtgggaatctccattcccaatgtatttttgtttgccggctatctacagagatacgatctgggagactgggcaaaggaccgttacggcgccatggctgtgaaagcttccgcctgcgtagcctgcggcgactgcgagacgcgctgtccttatcatcttcccatccgggacatgctgaaaaaagctgctgaagatttcggggaataatccagagatcaatatccattgcggtatccgtcctttcgtatgggatacgctcaaaaagatatttttataaaaacttctttattgactggagtacagatacaacagaactcccctcataaagaagttttttatttttctcttatatgcatatagaatttgaaatagaactttgtttgaaaataaaacctttctccataaataaaatttccccttactagatctataaataaaatttttacaattattttcaaataaagtatatacatgatactgccaaatatggtaagataaaaaaaaataacaataacaactaggaggtcacaattatgccaagagaaagaagaactaaaaagcaggtactggaagataagattgcaaagcttgacgagaccattgccacatacgaagaaaaaatagctgaggcaaatgaagaaaaagaacagctgaaagccaaattaaccgagatggaagaagccgctaaaagagcccaggaagaatccgagatgaaaaagctggtaagacttatgaaaaagaaaaatatgactactgaccaattagctcaattgctggacaatgcagaaaactaaagttttaatatcaccggatatttatttcacataaataccagagaagcttcttaattgatcagttgtgattaatcatagacctataaaaagaatcctgtgcggcaggattcttttttatattctggccaatcttaaggaactggaaatctggacagcagtcttttgaaacatttgtaattatatgtcgtagtatatacttaaaaaacagatttcatcgctgcccagtctatcctcttacacacaccgtgcctataaattcttttcatgttctttttaagactcacagctgcaaaggagggaacgtcaggcggatacccagcgtctccccatctaagacagcttgtgcctccccgccaagcttttccgtgagcagcttcaccaccgcaaggcccagtccggtacccttctcctggcgggaggaatctcctgtataaaaccggtcaaagagccggtccacttcaatagatgtgccggaccttattggattttccacccataaagtaatttggcccgcccggctttttaaaatctctatagaaatgcagcccgagccgtagtgtactgcattggtaagaagattttgtaagatacgctccatcatttccggatcggtctccataaatagagactctttaggcagcttaattaccggctgaatccccctgctctccagcaaagggacattttccgtgagaaaatccaccagaagattggataaatgaaccttacgcatttggggtgtgcaggaatgggaatccaatatagaaagctcataaaaggactggatcagtctcttcattgtatccgacctgcgttgtgctatgtctgtatgccgcctttgctcctgggtgagctctgacatttgaagcatctgcagatgtcccataatcacagtgagaggggttcgcagatcgtgagaaatattggcaatagattcttttaaatgctcctcgtttcgaatggcgcaggctgccacatatctctgactggcagaatacctattaagtacagcggccagacgctctaaatcctggtccatgagagaaatgtccagcatcttctcagaatttttgcccgcaatctcctccatctgttctgctatattcctcaactgccttttcaagagaaaaagtctgaggactgctgcacacaacagaatcataagaacgatcacaacgattaaaataccgtccgcctcccttcacttgctgtcacacttgctgcctggtacatcccgcctttgcttttgtcacatactatggttcatctgcttgtgcccgccaggagctttttcctgttttaccttgtgcttattgcaggtcacacctgcgaaatatcctccaggacagaaggatcaggacacactgccacaccactgccacaaccattgaagaaggcactaccagcccctgcgtaagtatggattcccgaatctggtacatgggcagaaaagaaaccggaagtcccagcatctgtccataccccagatacaaggccagcacaaaggtgaccccagccccggcaatcaccgcttttatagtatttcgaaacaaacagcagcacacaaccgccacaaggaagacggcactgttgttcaaaatggaataaaaaactgttttcagcacagtgcagacaaacacagttccctctcccaagccaaaggacagaacctctctcgcacatccccctatgggaaataaaagggccatcagattaaacgcagcgagataaaccagcagtttgcacagataaatctccagccttgcatgtcctgctgaaacctcctggtcaatggtcctccaggaaaattcctgtcctaaaagataagaaaaaaaactggtgattaaaattaatagaaacgtagagtcatacaccatcccattaaaaatatctgccagcgactccgcctccttctccaaaggccccatcagttccggcacatagctttctgccatggcaaatccaaggaggaaaatgcccgccagcgctcccagataaaaacgattatgaagaagatggtatctttccatttttataagattcgtcatctgcctgcctcctattgtagatcactgtgtctaaaacacagatacgctcctccatagagaaggacacaccacaagagatccactgccatcactacaccccgcttccccaaaagttggttctgagacagcagacgcagctgtcccatgggaagaaaccgtgagagcacctgtgcctgatcacggttcagggcaaaaatcgtgagaaaataacaggccaaaggcactgccagcgttcttcccacatccttaaaaagaaaggcgcaaaagactggaagcattcccatggccgccatagctgtcagaatcacagccacattcaacaaaagttctccaggctccacctgtgcccaatggctgccaagtccttccaaccctccgtgtaccaccaaaggaagtcccagcagaaccacacctcccacaagacaacagatggttttcccaaagagtatatccccccgtctgtgtccggagctgatatagccctgtatggtccggtttccaaaatcttggcccaaagataaaagtgcatacaaaatcataaggaaatataggattggtgtattgtacaaagacgcattcagccacccgctggtaaaatctcggctgtccagcagcataacactggacagaaccagggtaacggccaccatcccccaataggtcctgcttcgcaccaatttataaacttccgctctcaaaagattattcatggccccttccccctaccttctccaggaaatagtcctccagggtatccccggaaagggtaagtccagtgaccaagatccccgcctgggccagagccgccgccacagcctccacattgtccaggcactcatacagccgaatggttctgtctggcataagctgaaaattctctgtattcagtctctcctccagaaccaatagggctttttccggatgggcgcacttgatggcaatatgccttctacagcgcaattccagctctttttcagagatttcttctaaaatcttccctttgtgaatgaaaataaagcgggaggctgtctgatacagctcctctaaaatatgactggacactaaaatggtcataccatactctttattcagagatttcaaaagctctctgatctccacgatccccgttgggtccaaaccgttaatgggctcatccagaatcaaaaactccggtgtattcacaagagccgccgcgattcccagcctctgcctcatacccagggaaaagtttttcaccttcttttttcctgtatccgtcaatcccacagtgcgcaggcagctgtctgccactgccttgtccggaatccccctttgcagacgctgcacttccagattttcccgggcagtgagatttggaaaaagtgccggtgtctcaatcatacagccaagcctctttctctgctgctgaagctgtttttccccggactgcccccacagagacagcttcccctgggtgggaaaggccagaccggtaagaagtctgagaaacgtggtttttcccgccccgttctcgccgataaagccgtagatttttcctttttcaattttcagacttacctgatccagggccactgtatgcttatatatttttgtaagtccttctgtttccagaatctgttgattcatcttgtcatcctcctttaggaaatagtctaaaggacaatcctaaagaatttcttaaataaacgaagaaattaataaaaaatacctaaaaccacagttctcaatcctgatgcagccggtagccgattccccacacggtatcaatatattcctgccaaggacaactttccttcagctttgcccgcagattgctgatatgtacattcagtgtattatcctcgctgaaatattcctctccccacacgctgtgaaacaaatttgcctttgagaaaaccttatggggatggcttacaagcagttccaaaatggcaaattcctttgccgtcaaagacagctcttttccatctaaaaaagcaagattattttctccatctattctaagattcttatattgaagctgtttcttctcccggccccattgccctgccctgcgcaggctgctctctatgcgggccagaacctcctccatatcaaagggctttgtaatataatcatctgcccccagacggagcaggtcaattttattttgggtggtctcctttgcggaaataatgatcacaggaaccatagacttgtcccggatctgggagagcacactgtccccgcttttatagggcagcataagatccagcaagaccagatcaatggcattctcctccagacaggagagcacatgaaggccattgtacaaacacaccgtctcatagcccttttctctgagaaattcacttagcagctcctgaatctccaggtcatcctcaatgatcaaaatgcgcacgcccacacctccttcttatcaatgtaatacctgcaaaataaaagatttgcaaaaagaaaaacctcagtaaacactgaggttcttcgatggacctggcgggaatcgaacccgcgtccgaaagcctatcccttgcggtatctcccatcacagccgctgatttaacattccctcagatgcacgcccatcggcaggcttacatccttagtagcttcataatacatctaccggtgcaaagcttaaccggcaaggtttcccacatggtcgacgccagattcctaaagtgtgagtgctctagggctgacgagcagcaactaggctgctaacgcgtactgttcgtctgcgtttatatttagattccaggttattacgcagtcccggagtctgcggatggctgccccaacttcaaagcccccgtcgaaaccagtacaagcccttacttgtgtcccgcagtgagcggactggtgtacagacgacttcttccatttcattatatgtaactgcccccggaaagtcaaggcctttttcccggcaaaaactgtcaaataactgccggctgtctgcctcagcaggtatccgtcacaacggaggtcttgccgcagccgctgtctgcctcaagcaaagtgaggggatagtggagggcatttttgatttctgcctgcagggcaggagggaaatagtaagtttttttcatagattacctcctgaaaaagaaaaacctcagtgatcactgaggttctccaatggatctgggggaaattgtccccccagccaaaagcctattccttgcggccgctctccttgcagccgctgatttcatattttccacatggtggacaccagattcctggcagcctgtaccagatcaggcttccatactctttcctactgtctttttgatcacaaacaaggttgccagcataagcaggattcccacaggaagtgcaataaatgcggtctgtacaaagcctgccacaatataggtgacaaaggatacggcggcagctgtgatggcatagggaagctgggtggacacatggtttacatggtcacactgggcacctgctgaagccatgatggtggtatcggaaatgggtgagcaatggtcaccgcacacagcacctgccatacatgcagagatggagatgatcatcaggtttccgcttgtattggaaaatacagcaactacgatggggatcaggataccgaaggttccccaggaagtacccgtggcaaaagccagaccacagccaaccaagaaaataatggcgggaagcaggttcatgaaaccgcctgccgcggatttcatggcagtttccacaaacacagcagcgcctaagctgtctgtcattgcctttaatgtccaggcaaaggtaaggatcaaaattgcaggcaccattgccttaaagccttctggaatacatgccatacaatctctaaaggacaatactcggcggacaacatacagcacgatggtgatcacaatgccaaagaagctgcccagggccaagcctacagaagcatcactctgggaaaacgcatccacaaagctttccccgctgaaaaagccgccggtatagatcataccgatcacacagcagataaccaggcagataatggggatcagcagatcgatcacccttccgttgggattgccttcctcgtcactgcctgcattggcatagggacgtcctggtgtggtatagatatcacccttgagagcatttttctcatgaactgccatagggccgaattccaccttcataagagccatgccaaccatcatcacaatggtgagaagggcgtagaagttaaagggaatggcacggataaagatggaaagaccgtcctcaccctccacaaaaccactcactgcagccgcccaggaagagatcggggcgataatacatacaggagctgcggtggcatcaatcaaataagacaattttgcacgggatacattgtgcttgtctgtcacagggcgcatcacactgcccacagtaagacagttaaaatagtcatcaataaaaatcagcacgcccaggagcactgttgcaagctgtgcgcccacacggcttttaatatgctggctggcccagcgtccgaaagcagccgagcctccggcccggttcatcaggctgaccatggctcccaaaataaccaggaagaccaggattcccacattgtagctgtcggagagcactttgatgataccaccctgaaaaatctggacaacggttccttcaaaggaaaatccagaatagaacagggctcccactaaaattccaataaataaggagctgtaaacctcctttgtgatcaaggccagtgcgatcgccacaatgggcggcaccaaagcccagaatgttgcgtacatggcaggctgtgcggcttctgcttcttcagccagaaccgtcatggggaacatcatcacaagcaaaaaggctgtgaaaagtccggccagtactctttttcttttaacactcatttgtacatcctccctctttctttatccttacaaactgttattccctaaatatcctaaaaacacagttttccaaactttcctaggcagcaaaaaaccaggaacgtctgtctttgggacatggaacgttcctggttctcatagggctggttcagccctgatacttttgttgacaaccataagatagcgctccacaaaatgtgacagtccgcagcatgttctgctgcgtcccagagaaatccccggtgcaggaaaaaatctcttcggcagtctcccctttccatccgaacggctgccctgccttatgttccgatgtactgatgaagcctgcgcctctatcattctattttagtaacaatttgtaattctatatttagcttttatcacttttttccgctggtgtcaagtagttttcgccaattgggcgcacaattgacattttttgtggatttctggctttttacggaaaattatttgcacacaatatttctcacactgctccagcttccataataatttgtccctgtagacggagattttttataggcccggatgcgcacataatagcgggttttggattttaacaacttattttttatctgggtcatcttcctgccatagtacgtattcttgggcatattgtaattctgggtggtccctgaggtaaacttggagcttgtggaaatctgaatctggtacccggtgcaggcgctgaaccggttccacttaatagtcaccgctttattggaggtggtaagactcttgatcacaggaaccttaggcttggtcaccaccgtcaccacactgctaaaatcccccagactggtgaaggttttggacagtccctcataggtaaaggtatcccggaaataggctctcaccttaaacttatattcctttccaggatatactccattgcctttcagggtgtaagtgttccctgtcacattggccttacagtaatatttctttgcggaggggctgtaaatataaacctggtagttggtagcattgggaaccttgttccaggtaagcgtcacctggtccatggtctggctcttctgcttcaggccagttaccttgctaatgccggggatatccacgatctttgccgttatgcttccctccccatagtatctgcctgtgcctttcaccaatatggtcatgatccccggttttatattatcctcataggaaacttgaaaatctgttcccagggtcagcccgctgacggacaccactggcttgatctcctttcctgtgtagagatatactgtctgggccagggtgatcccctctgccggaaaggcctggggggtgggataccggttcataaacgcagcggtggtatagtccacatccctgatatgcccggagaagttctccatatctttcatgtaatagctgtaaacagtttttcccgcatcccaggtactgtcacagttataataatagccgtcctcccggcggatgatattccaggcatgggctataccgttgcctgtgccgctgatgatccggttgtcaatatttgcttctttcagaaaccggtacagtaaattggcatatccctgacacacagcagttccttttatcaaggcgttgtatgcagtatagcgtcctctttctgtcaaaaattcctcataggacttggttccattgttcacctcactgggcgccactctcacataatttttcttgtcataggagacatttgcgcacacataatcataaattgtacgtattttatcctcgtagcttttcgcccccaggttcatctgagctaaggcctgttccaccttctgggtcactgcctgctcctgctccggtgtggtatagtacagcatagaataatacagtgtaaccttgtttgctgatatcttgtaatcacatgacatatgtccatattggaactttaaatagtccccttctgagggtgacagatttccagtgtcttcaatggcttctttaaatatgctcttagctgttgaggagatttgattggaggcacaggttatctgaaggtttatcttccgctgccggtccaccatccctctgcgcatataagcggcagcatcctggatactggaaaaataggaaactgaagccctctgataataagccataggaggcttattggtttctacgtaatggaattctcctgttcccccatagagagggttctcatattccatgctgatccaagtattttcctgttccggctgtgagaaatctgaaatgccttctaatccttctgcctgaaacgattccggctgcgcctgtgtgtcttcccaaaaaacctcctgggtatcctgcaaattctgactgtcaacggtttcctggctgctctcattggcagcatctgaaaataaatcctccgccaacacggtgttggacggcagaagcatcatcgctgccagtaaaaaagctgttaatcttcggctccataattgtttcatcggcattatcctcctaaagcttagtccagttgtcacttttcctgttccaatatccccatggccaccttttctggtgtaataggcaggtctctcacccgcacacccacagcatggtaaatggcatttgctatggccgggcagggggtatcgatcaccagctctccgatggattttgctccaaaggggccggttttttcataactgggagcaaactccacacggatgtttccatagtccagcctggtagggattttatactgcataaaggaattgttcagcatctgtcctttctgattgtaggtgatatcttcaaaaagcgccatcccgattccctgggcgatccctccttctgtctggactctggccagattgggattaatgggcgttccacagtccaccactgctacgtagtccaaaacctccacactgcctgtctctttatccacctctacttctgccattcccaccataaagggcggcggagaaataggtgaggagaaggtacgggtcacgttcagctcctggcaattgccgcagcagccctttactgcgatctccttcagggaaacctttttctcctgataggtcacatacgctccgtcaaaatacacttcctcctggggtgcatccagcatctgggctcccagcttgcggattgcctcactcatggcctcacaggcctgtaccacagccgttccagtggtgtaggtggtggcagaggcataggatccggaatcataaggagaaatatccgtatccaccccgaaaaccacaatgttttccatggaagtggccagacaatctgcagccatctgggccaaaatggtatcacagccagttcccatatcggtacagcccagatttaaggtataagaaccatcttcactgagcttaatatttgcgcttcccacatccacgtgggcaatggaagagccctgcatagccatggccacgcccacgccacgcactttgccgttgcccatatctctggagggatatttttcatcccagccgatcatttccttggccttttccatacactggtccatggtgcagctgttggccacatccatgtctccgtaggcaggaagaggacctccctccacaggcatatttaactctctgattttcacaggatccatacccatcttagccgccagttcatccaccgcactctccaccgcataaatcccctgggtggctccatatccccggtaagccccagcggacatctgattggtatacaccacgtcataggcaaaacggtaagcctgggtatgccggtacagggcaatggatttgtgcccgcttaagcccaccgtggtgggtccgtgctctccaaaagccccggtgttggataaggtgtagagatcgatcgccttcacaattcccttctcatctgcccctatacgcaccttgatctccatggcatgacggggagaggaacagatctgtgattcataccggctgtacaccatcttggagggcttccctgtgatccaggtgaccagggcaggataaatctctgaaaccgctgtctgctttgccccaaagcctcccccgatcctgggcttgatcacccggatcttggaagctggaatgttaagggcattgcccagaattcttctcacatggaaaggaatctgagtggaatccagcacgcacagacggccgaaatggtccatataacagcaggtggtaaaggtctccatcatggtctgctggttggcttttgtccggtaggtgtgctccaccacatagggacaggaggccagaacctcatccacgtttccctgctcctccacagcggaagcacacaggtttttccggttgtctcctcccacattcaccttgggttcccagtcctcctccggatggaccagaacctgtgcctttaaggcctcatgggggtccagcacaggctccaggacctgatatttcaccttaattttcttcaatgccttgtccacggcacgctcagaatcaccggccacaatggccaccgcatctcccacaaaacgcactcgctgatccaggatcagacggtcatagggactcagctccgggtaggtctgtcctgccagagtaaagcgcttctggggtacatcttcgtaggtaagaacgcactcaattccaggcaccagcatggcaagtccagtctggacctcctctataagggcatgggcatgagggcttcgaagcacctttaccaccagacagtccttgggggccatgtcgttggtgtacactggctgccctgtcacaagagctgccgcatctatttttttcaccggctggtttacatacttgttcataaactgtcctcctgggtatcgtccggctcctgggtctttttccattccagataagccagaatgcttctggtctgggatacgaaaccagagcagcggcacagatttcctgccagatattccttgatctgcttctctgtgggatttggcagctccttaagcatggcaaatacattcatgataaagcccggattacagaagccgcactgctcagctccttccttggccagaaagcttccaaattcctctgcttccttttgcattccctcaatggtggtgatttcttttccctgggccctcacagccagaatgctgcaggagagcactggttttccattcatcaacactgtacacagaccacagtttgcagtctcacagccccgctttacgctgaaacagcccttgtctctcaacagatccagcagtatagtatccggctccacatctgcctggatatttttttcatttaacgtaaactcaatgtacatctgaaatccctcctaagctttcccaggcccttctcaccagaacctgggtgagatgacgtctatattcggctgaagctctcaagttgcttcctgtatttacatgagtcccagcgtattgggcaaaagcctgggccgcctgctttttctcttcctggcttttggcttcaaagtcctccaggattccctccgaatcctccaggatccctgcccggtaaggtcttgccccaatgaccgtacgcgcctttccgtttatgatggaggcacataccgtgagcacaggaaagtctgtcttggtatttctctggctcaggtatacggttttcaaaggtttcttcttgacgatcacattgactaatatgtcatccttatatttcccctgggcaaattcagccatgggaactctgccctcgtgatagagctgcacataggaatccagccccatgaacatggtgagcacatctgaaaatccgtaccttccgaagatgcttccccccacagtggcacagttgcggaactggatgcccacaatccggcgaaggctctcccggatggccccatttgtatatttgttcagtgccttgttcatctcaaggtcatgaagggtggtcatacagccgatgaaaaactccttctccgtctccttgatcttgttcagcccaagcccggaaaggtcaatggctgttcccaccttccggtctgtcattttcagccagaccatacctcccaatatacaggaggacttcttctggttcagctcataggcttcatccagattttccaccttcacatacttttttatcttaagcattttttcatcctttcctgtttcacacacacatggccggtatgtcccggctgccatttttatgccgcacttcacctgcttaaaaaaaggcactgcttcttgtgcagtgccgcatgctgtgtccctacttaaaattataacataggaaaaatcctgattgcaagagttagttggtcaatttttgctgagacatggaaaatgtccgggtctgctggcgcatgaccaggtaatacatgccgatgagcaggcctccggccaggatccaggcggccgggttagccagacaaacccctgcatagctgtcatatctggaggcaatgacagccgtggcccctcttcccaccagctctgccactccagccatcataggcaggatcccgtaacccataccctgaatgccattgcggaaaacattcacaaaggtcaaggggatgaaaaacaggcccacgcattttaaatacacatccaccagacggatcacctgggagacattttcagagataaacaagtaagtcatatatttccccgccacaaaaaccagagctcctgtaacaacaccgtacaccactccgatgatattggcggagcgaaagccctggcggatccggtcgatctttccggcccccatattctgggcacagaaggtggccatggtagttccaagagccacataggcctgagtcaccacctgctcaatcttattccccgccgtgaagcctgccactgccagagagcccagccggttcagagaggactgcaccatcatggtaccgatggctgttatggaatactgaagagccatgggaaatcccactcccatctgaagccttgccaaatggccgtccagcttccagtcatccctggacaggcgcagaatgggaaccttcttaataatgtaaatgagacacaagataccggacacgccctgggaaaccaccgtagcccaggccgctcccaccgcccccatatggaagaccacgatcagcaccaggtccagcacaatatttaaaacagcggacaaaatcaaaaagtaaaggggtgttttgctgttccccaaagccctgagaatgcttgccagaaggttatacaaaaccgttgctgcgatccccccgcagatgaccataatataggcataggcatccttgaaaatatcctccggggtgttcataaacaccagcagtttcttcatgcagagcatactcactgctgtcatgaccaccgccacgataatggaaagaaccgcagccgaacccacagtttttctcatggcctggtagtctccggctccaaatttctgggaagtcagcaccgtaaatcccgctgtcagccccatcataaatcctaagatcaggaacatgatcgttcccgtagagcccaccgctgccagagctttggtccccacaaattttcctacaatgatggtgtccaccatactgtaaaattgttggaatacatttccaataaacacggggatcgtaaagttcatgatcatctttacgggacttcccaccgtcatgtctctttgtgccatcctgctgcctctcttcctgtaaaacttcgcaagtttgaatacgagggccattatattaaaaatgtccgctctttgcaagagaaaaggcacaaaaagaaaagcctatttttcgccatagaatccctgtttttttgtgcagtttttcgaaaacagcaggcttatatttacctgaggtccggacacctgcataggcccggtttataaatcatccaccagcacagagcttttggcataggccgtgcttttcgcctcaaaaaagtctgtcttcaccatattggcattggagtactggctcacccagcgcatactctccggctccttttcgctgccttcatagatgggggcaaagccaagactttccatacgcaggtttcccagatattgaatatattccgtgatcatctccttggtgagtcctggaatctcatctccgatcacataatgtccccaggcgatttcctgccttactccctccataagcatgtcccttaggatctctgtgcgctctttggaaaaaagggcaggctcttcttttttcaactccaggatcatgttccggaacagccacagatgggtattctcatccctgttaatgtaccggatctcctgggcagacccaggcattttaccattgcggctcaggttatagaaaaacataaagccgctgtaaaaatatacgccctccagaatataattggccatcatcaccttcagcagggtaaaggcatccttctgttcctggaactcattgtacagatttccaatgaaagtatttctggccagaaggtggctgtctgtcttccactgatataggatctccatgcgtttgtccgggctgcagatggtatccagcatatagctgtagctctggctgtggacacactcctggaaggcctggatggacagacacatattgatctcattggctgtgatatactccccgatacaaggcagattggctgtctgaatggagtccaggaacaccaagaagctcaagattttatcataagccgtgcgctctgccggggacagatttttataatccttcacatcctgggacagattgatctcctccggtatccagaaattattcatggcctggcggtaccagtcactgacccagccatagcgcagattgttaaaatcattgagattggtggtgttgcctccgatcatcctgcgctttcctgcttctgtgtcccccaggggattaaacaagggttttttcactaattcactcatattccttcctctttccttccttttaagaagagcagctctcgcactcttccacctccaacgatttgctcctcacataatagatggtcttcaccccgcactcccaggcctggatgtaaagattcagcacctggcgcatggtatagtcattggttatatataaattcatactctgggcctggtcgatatgacgctggcgcacaccgcaggcacgcacgctccaggtttggtccagatagtgggcattcttataataccagtaggtctccggggacagctcaggcgccactctaggcagcatgctgccctttttctcttccaggaaaaacttcttcatcaccggatccaggccggcggtggtccctgatagaatactggtgctgctggtaggcgccacggccagaagatatgcgtttcgcatccctaatttctttaccctttccctcagctcctcccaggccaaagagtggtaaccccgcttctcaaaataagctcccgtctcccagtcgcttcccaaaaagcaggcataactccccttttcctctgccagagaacagctggccttcaccgcacaccggttgatccgctcaaagacctcctgggcaaactccagatgggcttcactttcccaggaaattttccttttggccagcatatgatgataaccgctgacgcccaggccgatcccccggtatttctcattggtgagctttgcatagggaagagggtagaaattcaagtcgatcacattgtccagggcccgcaccgctgtctcaataagcgtttccatataagtctcatcctccacaggaagcctgccaagggaaaggctggccaggttacacaccacaaattctcctggctgtgtggtggtgacgatcacggggccctcctcccccctgtggatctccttggaaatgctttgaataggggccatattctgggcgatctctgtacatagattggaacaatagatcataccctcatgggagttgggattggcccggttcaccacatcccggttaaaagcaaagggggtcccggtctccaccgcggactttaagatcagccgcaccagatcctttaataccaccccacgcttgggtatcctggtatcctggacacagtcccaataccgtttctcccactcctctccccaaaaatcctccagggcatagcccttcacggtgagaacctcatggggacacagaagataccaggtctggttcagatcctccctggccatcttccagaacagatccggataacacacggccgggaacacatcatgggccttcatccggtcatctccattgttggtgcgcagctggagaaactccggcaggtccttatgccaggcatccagatacacggccaccgccccctggcgcattcccagctggtccacggccaccgctgtgtcattcacaatgcggatccaacggatcacgcctcccgcagtgccttcaaagccccggatgctgctgcccccagctctcacttttccgaaatacaggcccatgcctcctccgaatttgctcacctgggcaaagttatcaatgcttctgtagattccctccagactgtccggcaccaggtcaataaaacagctggaaagctgatggtagggctttcttgcattggacaaggtaggggtggccatggtcacctccatggaactgagcatctggtaaaaccgtctcacccaatccatccggttctttttttcattcatggccagatgaagggaaagccccaaaaacatttcctggggtgtctccaggggcacatggctgcgggtctggatcacataccgctttaacagcaggtccagtccggaataggtgaacagataatctctggaggggtccagaaactgctctgcctccaaaagctccctgccagaatagttttccaaaatataggagccataaagtccctcctgggtaagatacaggaccttttcatagaaattgcggatatggcgtttctccatctcctttctgagacggcaggtaaactgcaggttcaaaagcctcgccccgataaactcccacttgggcgcctcctgggtggtgagctccacagcagccttcaccaaagcggaaagcttttcttcctttgtcatggcaggcttaagaaagcatttgaatttaaaaagaaggatctgcaggtcatagacctcctccttaaaatcctcctggattttctcaagctcctgttccaaccccagaacctccagctttcccgccagctcctgtctgatggcccgaagctcctggcgcttctgccgatataggatataattttttgccacctggtaatggccccgctccataagagcctgctccacccagtcctggatgttttccactgtgagctcccgatcctggaatctctcctccaccattttcagaagtatttccggttcctggtcctccaccttctggccgcttccctgaaatgctttttttatggcgtttatgattttctccgggctgtatttctcttcctgcccgcctcgctttctgatcatcatcttccctctgaattctccttttctttccatcattccactccagctgcaaattataccttagcaggtactggcagctccgtctgtcctttattgtacttcatgaggagtataatttcaactatttttatccagttttatttctgccctataaaattggaaaaggagccgcattgtgccgccccttttctctttcctactacttgaatcctctgttattctattttttcactgagatatcatttagacactttctattcccacacctattaaaacatttccttgttgatctcctcaatggcttctgaaactgcctcatacacacctgggaaggaactcatggccagcccctgggtggtatttggaatatagaacttggttccattggcagcacaagccttgcgcacctccctggcaaccagctccttgttccagtccgggcggtccacagccgcactgtcgatccctcccataaaggtaagctgtcctccatatttttcaataagctccggaatattgttggaggtcataacaccctgccagatgtccacgcccatttcgatcatatagggaaccagggtggcggcaaaggaatccgaatggtggatcaccagctctaccccgtgctccttataatatccataaatcttcttataagacggcaggaaaaactccttaaacatatccggtgagataaatgtggaggtctggctgccccagtcatcatggtggaaaacagcatctggcttaatatatttacagatcttctccgcataggaaagctcccactctgtaagatagtcaattaactcctgggtgtactccggctcctcatagaaattgatcagacagttctgaatctcctgaagatggtggcactgctcgaaaagtcccggagccacaaactgggttgcaaaatattcattcctgtctacttcctccgccatcttaataaagggctcccactcctcatctgtataatccaggcggggcgcatgaacatacttctgccactgggtgatgtccttgcacacaatgtgctcggcatcgtggatgggaaagcttcccggagttccctcaggccatacgttggtcacaccccaggcattcaccaccggcggcttcccatattccggctggggactgctggctgtatatggattggccagcagcatggcaaaggcctcatactgattcacataacggtccggcttcccgcccttaatggtttccagtaaattctgtcttcttgtaagcataataaaaacctcccttttcgtcaaaacaaaggttggagatccgcttccctgctttctcacaacctcattgttaaccccattgctctttacaggtccatcataccagatttggacgccctcgtaaatccaacgaaaccattgacttttccctgtccatgcactacactttgtagtatgcagaatccatgacagcgggtttcttcctacactggaaccccatggacaaaaggagtcccaagcctatgaaattatcattttccctattgtattaccaattgaaaaaatcttatcccgtccagaggatttcctgtaatccctgtaaaatctccgtggaccgcccggtgtgctattatcctggcggcttctttcacggacgggctgttttattggataccaaagccctcccccatcttctgtgtgaacccgatgcctgccggtctaatattttcatctgctttggttccctctcccccacacattgtcgggtggatgccgaggtgcttgtactggacagctccataaaaaaagaggccgtcctttgtaccctacaggagatcttcgatctttttgaccgcctggagtcctcccttctggaggcctattgggaaaatcaaagcttccgggccatgctcacctgctgtgaggatgtctttgacctgccctttaccctcacggattccaatttttcttatgttttttacagccgccggtccgatgacgcaggccttaccagaaaattcgtcaatgaccgtcagtccctgcccatttccatggccagcatggtcatgtctgatcctgtacacaaaaaaaccagcatgctcagagaaatatactcctacaccctggatcagaccacttctttatgtaaaaacattttttataatggagatgccgtgggaaagctctttgtgctccagtccaccgaccccactaccaatgaataccaccgggagctgctcactttcaccgcctcccatattgagaagctctatgcccgctacggctccttccacccctccagggcggcccttggaaccctccacacccttttggagcaggccctcctgggaaagccctatcacaaggactcctgggaccaggctctgggccctgtccactggaaggaaagccacacctatctccttcttcagctccggcccaattaccggtacgacaaaaatctatacagcaattatctctgtccggagattgaaaagctatggaagggaagctgcagcatccagcacggagacagcatctttgtgttgctgaacaaaacagtctacaggcagtccacggacaaggaattccgtcaggagctggcctattttctccgggaaaatctcctcgccgccggtctgtcccgttcctttcaggatctggaacacctgctggattaccgcagacagacagatcttgcctttgctctggggattcaaagagatccctacttctggtattttaaatttgacgactatgctctggactttttcctccagcagggcttgggcggcttcactccagaccagatatgccaccccggcctcaccgccctcctggaccatgacaaaaaaattcacacagaatattacaagaccttaaaaacctatgtacaatgtcggtacaacgctgctctcaccgcacagaccctctatatccaccgaagcaccctgctcaaccgcctggagcgcatccggcaggtggcacatatggacctggaagatccaaactgccgtctctacctggagatttccttaaagcttctcagttcttctcattctccttttccagaagacggaaagaaagattcaagtacagaagctcctccgtgtcctccagatccgactccaaaattgccttgatcttatccagccggtacagaaaggtacttctgtgaatatacagctccttggcagactgaaccacattttggtgatgatccagataggcccttaaggtcttcatgtactctgtaccatgctgctcatccatttccttgagcaccagaagcttctcatgacagagcatgtttccgggaagctttctggtagtctgctccagaatataggtcatggcgatctggttaaaataatggatccacagatacggctttttcctgctgcccacatccagcgccagacaggactgaatgtactgccgccggagatttaaatgtccacgcatcaccctgctgtagccggcttttaagaagctgtccctgataaaatgggtcagcttggccgctacagtctcctcatcggtttccattagtgtcaagtcaaaaaaagtgacgatatcctcctggaaggtaaagctgcagcaggcatcaaaatgctcttccatataattacagatggcattggaggtaagatttctctggtccagataggtgaccttatataccagacacaaatactcatgctcccgaagccagccaagagccccaagcccctggctggcctccatataatccaaggttctgtcagagaggattctctgaaacagcctctgaagattcttatccttggaagaagcgccggaagtcttattctgaagaaaataccgtacatattttcccaaaatctccaacagatccccgtctgattcacacagatccttcctatattccatgatcaccaggcggtgggtggtacgtccctcctggcggatattcaggttgatagaacgaaagcctgtgacataatccggaagccagaaaatcccctccgcctccctggtctcgttaaactgggtatcctggatcagagcgttcacatagtccatctgctctttgcccggctcaaaaatacggtactcctttggaagcggcgtcacgctggccagggcatgaagggtaaaatccattcccatgaccatgattggatttccgatcaccggaagggaggcctggagaagatcctcgatcctgccctgctccatctgaatttcccgcagccgctcttcccagctttcataataatcataagccttcaaaaccccgttaaaaagcacagggagctcctgctcttcctgcagaaggacactggcacattcttccggaaggtcttcttcctttccctccataaagatccaaaaggacgctttgggaggacggctctccccctccagcacagccgggctggatgccacatacacccagcctgcctcgggagtctctccctgctcatataacaacggtccccgcaccttgcctgcggcgcccatattcttctctgctttaaaagcaaactgctcccgcagatgggacattaatattctgtctgtgagtttcacgttcgtttcctctgtactttctcttgattcatatcaaaaaagtctttgccacctccgctgcatccacagctgtttctgtataggcatccgccccgatctcctgggcaaactcacgggtcaccgacccgccgcccaccatgatcttcagatgccgcttcttatcacttctgcgaagggcttttacaacctggcgcatctgtggggcagatgtggacaaaagggaagaaatgcacacgatcgatacctccggattttcctttacagccttcaaaaactgcttttctgaaatatccacacccagatcgatcaccttaaagcctgcactgcggaacataatggccaccagattcttacccacatcatgaaggtctccctccacagtacccaagatcacggttccgatataccggtcctcctccagtcccaggtagggctccagaaggtctactcccttgcgcatccctctggctgccgccaggatcctgggaatatctgcctcgttattcttatagtcctgtcccacgtttctcatggcggggatcattccctgctccagaatatcccgcggctctatcccctggtccaaagcctgtttgattatcttttctgtctccttcggccgtcctttctcaatggactgtcgaatctcctccaagatagccatactcccctcccgcatttcctgtcacatccatcttctgctgtcacattcttctctgctctctattttaaccgttattccaacaaaaaacaactggtatatgcaatggtacatggtccataataataggaaagaccgttatctttgcagatttctgtcaccagcatgccataagcctccatggaggcaaaggaattctccggaaaacggcagggttcctttggataggtgcattctttgcaccttgtgcagcagccgctgccgatggaaagcatgccgggatacttttttaaaagcagctcacgaagcttgttgaaattctccttgtgccgggcctctgcctccatcatgccctccccgtccatggaatcctccagctgtcccaccgtctgaaccaaaattccatgagaatacctttttattcttttttcacattcctccaaggtgccgcagcctggaggacagctccaattttttccatacatgtgacagctgtttttctcacacatttcccgcacctctggcaaaaggcggatggtgctcccctccagttttgacacgtaggtaaaaccacagctctttccctgttcttccaattccctgtaatctaacataaagcttccctccttattttgaaacttccggaaattccaattcgtccacaaaacagtcctgaaattccggcaaagctgccaactctaaaaattctgttttccttgcatatacttgtgcctttttccaaagctgctgattcaaaagcaccattttagccccctctcctgccgcgttgcccagagccttcacctttccctgaaactctcttggaagaaggccgatggtacaggcactgtccggagaaagaaaactgccaaaggctcccgcgatccacacctgggagatctcctccagagaaattcccatcttcttggccaacagatgaatgcctgcagagatggctgcctttgccagctgcagctcccggatgtccttctgatttaagaaaaccggctccttcgtagcgctctgctccctatccgccaatagaatttccttctctcccaaaagctccccggattcatccatcttcccacatttcaaaagctcggccgccaggtccaaaagaccggaaccgcagattccccttgggggctcctggccgatggtggtgtatttccaaccgccctcctgccattttacagaattcaccgctcccgccgctccccgcattccgcaggtgatctttgccccttcaaaggccgggcctgctgccgtggagcaggtgagcatccggttgtccttcccaaggaccatctccccgtttgttcctatatcaatgagcagcgtccagtccttctgctccggcagggctgatgccacaaggcaggccaccgtgtctgcccccacaaagcctgcaatgttgggcagcacaaaaagctgtccctgaggatgaatggataccccaaaatccttggcccacagcaccatgggctcttccacagccggattatagggagaatgcaccaggcttcccacctggattcccagaaacagatgatgcatacaggtatttcctgcaaaagaaacctgataaattttctctgtttcaattcccgcctgcactgccatgtcctggagcatgtcatttactgttttgcgaatacaggccgtgaccgcttccatgccctgctccagagcatagttggaccgattgatcacatctgccccatattgggcctgaggattcattctgctggccacagctgcctcctcccccttctccagatccagaagatagccagccactgttgtggttcctatgtcaaaagcggctccatagggtcttggcctttccctgcagatgtccagcacctggccctcagacaccactgcccacacactgccctgactccggcccaagaaaccgtagagcttagaggccgcctgaaggtttaccggaaactccctgtgtgtccctaatttctcctgcaaagccctgtgaaacctggtccagtcagaaatactctctcccacaggacagggggggacctgtacctccacaacctgaagcactgggtcaaaaggaattttctggttccttcctctggtaaggatctcatgcccctcttctcttaccagggtgtccacctgcaaatcttccattaccactgtctggcaggccttcacaattttgttctcatctccagtcagccgcaccttacattttccgcacagccctctccccccgcagggggcatccggctgaaggcccgcagtgcgcaaaacctccagaagcgtgcttccctgctctgccttcacggtcttattctctcttacaaaatgtacatttaatgtcattccaacactcccaactttttgctgtcatttccatgatcacacaagggcggggtactgcccgaaaacagcgccccgcccttaaaattatttacccgctaagtttatatgtatttatgctgccagctcttttgccttggaggctgcggaagcagcatctgctgtataagcatctgcaccgatctcatcagcaaattcctgggtaatcggtgcgccgcctaccatgatcttgatatcgcttctgaaatcctgtgcattcaaagcttccacagtggctttcattgccggcatggttgttgtaagaagtgcagacagtccaacgatcttcacatctgggtttgcctttaccgcttccacaaatttatctgcagatacgtcaacgcctaagtcgatcacttcaaatccggcactctcgatcatcatgcataccaggttctttccaatgtcatgaaggtcgccggctaccgttccgatgatcaccttacctgcgctgcttcctgcatccgctgccatatgaggtttcagaacatccacaccttttttcatagctctggctgcaaccagcatctcaggaacaaagatctcattgtttttaaacttttcgcctacaacacccatggcatcgatcatggcattgagaatgtccattggatcatttccttcatccagagcttcctgaaccagtccaggcactaatttagattttcccgctgcgactttctctgctacttcctgtaacttactcataatcatttcctccttataccactcataaatttttctgttttccatttctattttcgtttctgcatttgatctatactattttttaaccggaccgatcaagccctctctgtaggcgccgatgtattccatacagaattcatcttctcccagaagtgcctctgtggcatagatcagtcccagcatatcccggtttgttggatctaaaatggcgctgtccagtcccgcattcatggccagcacggtaaatcctaagttcaccagttttctaaccggcaggttaaaggaaatattgctcactgccgcagtgatatggatgcttggatacatctcccgcacctttgagatcacctcaatgttcatggcaatgccgtcctcagaggtgcacagcatttccaccagaggatcgatgtggatcctgcttgggctgatgccatattccttggcctttgccattatattttcaaatactcgtaaacggtccgctgcagattttggaattcctgtgtcatcactgagcagagcgatcacctgccagcctttgttttcctctttcgccataattgggaaaatggtgtcgatcttatccccttctcctgatacagaattgaaaagtccagggcgcttgcagtaggtgtatacctctgccaaaacctttgcacttgggctgtccacggaaatgggaagatccgtggcctcctgaatgcagtcaatcatccattttaaagtttccacttcaacttcttccggaacagaagcgcagcagtcaatgaatgtggcattggcctgtgcctgaatccttgccctgtttttaataaattccgcatctctgttggcaatggcttctgctacggctggaatggaaccattaattttttccccaataattatcatgtttttccaacctcctgtctttgatgtttctattttaacagatagctatctgtttttcatcccacaaagtattcgtaaaaaaaaggactattcctacatactgtaggaatagtctctttgtcttttcagggaattcttatcctcttcccgttctgtatacacaggaccccggcgggacccttcttccaagttctcctcctcaattgagcatccccttaatttcctgcagtatcgaccatacatagggggctccgaatacattcaaagcctttggccctttgatccgctccgggtcagactccagcttataaaaagccttctgaagggtgcttttcgtaatggatttggacctgcggtccacaaacatctcaccccccttgatccggtactggaagggaagtcccttctttgtataaaaggtctccccctgtttttcctctattttctgccaaatccttatccaggcggcctgaagcttctctgtttccaaattctccataacattcctcttgatttcttatttgctgcataattgttcctagatcattcctgcttaatcatttccgcttagttattcctgcttgttttttccacagcaatgtttatattttttgccgctgccgcagggacaagggtcattgggatagattttttttgcaaagggaataatgtttgcctgagtactgtctcttccgggaattacaggactggaggcatccatacaacgggccctgttttccccgcccctgccagaacctcctttaaaatggtccagctcctcctgggtaaatccccgcgtttcccagcatctgatattccagatgcagcctgttttcccaaaactccacaaagctctgggtattgtcatccggctcctggcagcacagctgtgcgtagcttttgaattcctccctggtttttggcagatagtatggcagactgccctggctcttcaaaaggttttcaaatacatgttcttcctccagatcctcatccatgagccaggtgttgtccaccagggcaaaatcagtgtcgttggtatctatatattgctgacacagcctggtcatctcttcctgggttatattttctttttcatatttattataaatctttgtcagctcctccagggagaggactccataaagataaaccgcactttcacagcactcctcaacagcccacttctgcttccatgcccttttcatctctttggtgcagacctttttatacttttcctttacgtccttgggaaccgttagaaattccatctctgtaaatccacagtaagaacataacaacagagaaactgacaccagctcttcgctgatatagcggcctccgtccatggcctcctgaaagatttcaatttcgtcccgattacactgttccaggatcttcttcatatggaccgtctccaacagagaatttttcagccactggaccagatccttcttgctgaaacggctgtagcccacaagctgatgagcttttgcgagctcctgcagattttcttttgtatagacagagaaaatatcctccagcataagctcattgggtgtaacccttccctttgcccctggcagattctgtttttcctctaagtaattcaaagacaattccttcagaaatttcctgaactcattttcgaattttatgttcggacctttcttatgagaagaagcctgcgccttttttatgctcatatgttccttaaaaaaattattggccgtctccatatcgaaaggacatacctcttccatctcttgataaaatccccagatccctccacagtcctctatcatcttgggtcccctggattttatcacctgaggatagcggttatcatagggcacgatcacacgtctccatatgggcggtttgctgcccttaattgtaatttttagttgataacctttcattctttcaatcctccgtaaaaatcccagtctgcagcacagccgcctctcccttgccagccaggaaaaaccgtgggataacctctcattgtcttatccagagtccagattattttctgcccttcctcctgcgcctatggaagtttaagaagcctggcttttttattacataggaaagttcttagaactttcctatgtaataaaaaccctccgggggatgcacacaatgtgccagggaaagctgcttcgcagctgcacattggcgcacaaagctaccaagcccctcatgagtgaggggatggggagttgaagcgggcttgtccgctttgttctaggacctattatataacacctttcctataaaagcattatgaatcgcatatttattctcagaattttcaccttttctgccatagaccgaatgcttgccgctccagaacacaccctgcacagattttccatccaccatcccccagcttctaagatacctgacttgtcacagaaaaatggctgccgaagcttccaactcccgcagccataaaatagttcccgatttctcatccctcatttaatctctcaaattaccaccagctcgcccggctggtattctgcccggctcatggggcatacatggacgatttcccgcagaagctcctccttatcctcatgggcaaaaaaagctctgcccataatgatccggtctgccccggccctcacacattccttggccctgtccaggtccagtcctccgtccacactgatggatacctgcccttggtcttcttctaaagcctgacggatccgtgtgattctttcataggtgtctggcaaaaatacagaatgctcctgtcccggctgggcgctcatgactaaaatatcatccacctgtcccaaataagggcgtatcatctcccagggactgcttggggaaatggcgatccctgcctcaatccccctgtttttcagcagccggataaacctttgattgttttcctcaggcagggcctccacgtgaagagtcacccgccttggctttaattccagataggcctccagcatggattccgtcacataggccataaaatgaaagtcctttttcacagacagaacattctggatattcttgatccacatctggttaaatccacacaacgggacaaaatgcccgtccatgatatctacatgaagagaaaataccggcatgttatccagcatgcgcaattctttttccatatgaagaatgtctgccgcaaaaagcgaaatggacaaatccgccacaccagttcctcctctcactgcttgttctcaccagtttcctgcaaaaggcgctgtcccacctcacctcccggatggatcaccagaaactcctctttcgtatagcccttctcattggccatagcaatggacagagcatcaaatacagcgatcactccaagcgtgctggctgtggccagcatgttgaattcatccggctccctctcaatctttacaggtagaaccaaggtactcatttttgccagggcactgtccaggttctcggtcacagtaagcactgccgttcctttgtgcccacaggcctttgcgatcatctccagctctggggtatggccgcccttagaaaaaaggatcaccaaatcctcctgctgcacagcccccattcctccatgaagagcctgtgccggcgacagataaaaggctggcatttctatacagcataaagtgtgagccacctttttcgcagccgccccggaagttccacaccccgaggtaatgatcttccccctgcacccctgtataagaagaactgcctttttcactgtctgctcatccatggtatctgccagacggcggatctcctgtgcctccttgcaaagaacccttcgaaaatcctccacccacccagcatccggcctttctccggatccagagatctgacgtatattctcctggaccgcttcctcttccctgttcttaatctctgtgtcacacctgcttatttccctgtccataatatgcatcatccccaaactttctgttgtagtgcttgttcttcaattcctcctggatcacaggaagctgcccctgggtcatcacataattgcaccaggccattttcgacaggtattccagcacctgactgttctgcactgctgccaagggggaagttccccacacaaaggggccgtggctgtgcaccagaactgcgttcatcttcttgcagtccagctcccggaaccgctccaatatgacagcacctgtattcttctcatattcccctgcgatctccgttggtgtcatgagccgggtacaggggatgtctccgtagaaatagtcacagtgtgtggttccgtaacagggaatgtcctttccgaactgtgcccacatggtggcgaactgggaatgggtatgtacgatccctctgatgccgctgtccttaaatgccttataaagctcaatgtgagtggctgtatctgtggagggtgcacagtccccttccaccactctcccctccatatccacaaccaccatatgctccaccttcatcacatcataatgaacgccgctggccttgatcaccatgagatccgtctccgggtcgtagccagatacatttccccaggtgctgatcaccagattctttgtcaccagatccaaatttgcttccaatacgtgtttctttaattcctctaacattttttatccaactccttttccctgagacagttttccatgcgctgtttcatgcgcctcatcacctgattttctcctcttccgaaatagtcgtggagaagctcatattccttgtagatctcatcataggccttcttgttctcttcctttggccagtacaccttgtcctgaaggcttcccatcgcctcagcggcttccttcacgcagtcatagcctcccagctccgctcccgccgccagggctgcccagatacaagaagacagggctgcattttgcttggagcccgcgatgcggatgggccttccagtcacatctgcatacacctgcattataaaaggatttttctctgcgataccgccggcgatgatcacttcctccacaggcacctgatgctgggtaaaggtttcaatgatcttcctggttccaaaggccgtagcctcaatcaatgcccggtaaatatcctccggctttgtgagaagggtacagccaaggagcatcccggataaggtgccgtccaccagaacggaccggttcccattccaccagtccagggccactagaccgctctctcccactgcctttttctctgccagctcattcaaataggtataaatattcttcccctgctcctttgcccgttgttcataggaagcgggcaggcagttttccacaaaccaggagaaatgatcacccacacagctctgtcccgcctcatatccaaaatagcccggaatgatcccgtcctccacataaccacagattcccggaacctcatgctcggtctcacacataagctcatgacagctggaggtccccatcatgatcagcattttcccaggtccggtaaccttggcgccgatggtggctccgtgggcatccagatgggccgttgccacaggtgtgcctggcagaagtccggtgagctctgccccttcctgggtgagaaggcctgccctggttcctatggagcgcacctcaccccagaacttctcctcaatgacattttccagcctgggatccagggctttaaaatattctctggaaggaaacccgtccttcttgtgccagcaggcctttgccccggcagaacagctgttgcggatcagctttccggtaagtctcatcacaatccagtctgtagcctccaagaaggcatccgctttgtcatacacctggggactttcctccagggtctgccagattttcggaaacatccactcactggataattttcctccgtatctgcggataaacttttcctgcctttcctgggcagtcttggtcatcctgtctgcccagggctgggctgaatgatgcttccacagcttcacataggcattgggtgtactctgaaactcctccaaaaagcacagaggcgttccgtcctttaaaatgggcagcatggtacaggaggtaaaatccactccgatcccgatcacctgctggggcgtaacattggctttttccaatgcctggcggatggtacaggagagcacatccagataatcctggggatgctgcagatgccagtccaccagaagaggggtgccgtccggcagagcctcactcataacctgatgaggatattccaaaaccgccgctgcctcttcccttccggtctgcacatccaccaccagacatctgcccgataacgttccaaaatcaatgcctactgtatactttttcaaattcatccctcctaatacattactttagcttgttacagtcaatggtttcctggaccattttcatatgtttgttgtattcttttccctttctcagggtcagccccacgaacaatgcatccaggatggcctggtcagccactctgcgggtcactttctctctgccgcaggtcagatcgctggtggatataaataaggcaatgtccgtcaccttcagcaatggggatttgttcattttggtgatgcagatggtggtggctccctttgcttttgccacccgcatggcttccaccacatttctggagcgcccctcgtaggacacggcaaaggccacatcacccggccccatatttgccgctgccatgagctggagcatcacatcgctgtaggcagagccatgaattcccattctgctgatcttcatatgggacagctgacacaccgcataggcatccccaactccgaaaaaatgaatagattttgcacttgccatagcatttaatgcttcttcgtagttggatgtggccaatgacaacgtgtctgtgagcgtctgcatattactctgaaacactttttttaaaattgttgccatgtcatccttggcatcaatttcttcctcctggctttccccgctgtcctcattgatcaccgataagaaagcctgtttaaattctgtgtatccgttgtatcccatacgcttacagaatcgtatgatagaagcatcgctgctgccggtttcatgggcaaggcttgccagagtcagattcataatggcctccggattctccaataaagcctctgccactaccttttctgccctcggaagagatggaagctgaaatctgatgcgcaccattatttcattcatacctttcctccacttttccagtaagtttttggttccttacttcaaattaagaatagcatgataaagcagtgaagtaaatttcctatctttttttcgtggttttgattgtatttttccttatatttccgtctttttcttaatataattatacaaattgcacagttttttatttttttcacttcattttgaaacaaaaaatccgaatatttacttcactaaatttttcgtcattgccatatatatccaatttccccgaaaaacgcgaaaaacgctgcaagtgagatttttctcacctgcaacgtttttctcacagaccagaaggtctgatttatttgtcattctaaattggcatgccgattctgcatgaactcctcggaaattccatgttgctccataagctgaaggatcacagcctccacagtcacaaacagagcctcttcaaaaagcccgcccataggctgaatggaattcttctccccggctctctcatatttggcagctgccttcagataaacagccacatccgcagctttcccaagacaggagtcctcctttgcagtaaaaacaagggttttcattcccaaactctttgccttgcccgcataagccttcaaggcccctgtctccccgctcccgctccctaagatcagcagatctcccgcacttgcgccaggcgtattgttgtccccgatccagtacaccggatatcccgcctgcatcagcctcatggaaaaacaacgcattatataacccgtccgccccgcacctgccacaaaaatccggcccgcctcctggatcaggtcacacacatcctggaaatccgtcctgtctgtggcctccaaacaggccctcagctcctgaagaatttcatgggtatatctggcaaacatatttgcccctttccctatggaaccgcaaaatctattccccttctttataccaagtttttttagaaatgtaaagagggattgggaagttttcacatcattcagattttgtatactcttaaatccttccgattctctcccaatcttcgggaaaccccattttctcaaggatatccttatttactggatatttccggaagcacactttcaaattatgaaaaaatgctttaaattcatcttctggcaataaaagttttaaaataattaattgtgcaaacagatcgttcttaccataaatatatcgtccatgttctcttgacaccgaaagtctttcatgtatcttcatatctaataaagcatcctttgtatggaagtcatacaaacgatcattatgagcacatacatttctaaattttgtcatgactgccaatatcttactcatctcattgactttcatcaatccaaaatcacgacaaacttttatttgcacgcggcctttttgacaactatatattttagatagctgcccaattgtcaatacatttaacagtacccataagggtacataattgtattttaccatatagtgccgaatatatgcatagtcgctgtcattgcgaatctgccctttcataatcttcagcatattttgaatcactgtttttttctttccaacataatcataatgactgacatccagataatcttcctgtttatcaccgtacgcaacacaaaaatgatacgataaagaagatttaacatttctttctacaattaagatatactttataaatatactacgcaaatcattatcaaattgatataattcataaatatcttcaaaagtaacacctttttgaaattggttcgttgtcggatctttatacgcatctttgtatccactgatcaacggaaaatatcctgttttaaacaatatttttttagcatactcttcatcttttatttccagcttctttttttccttcaaaaaaacaatctgttcatcatatgttaaaaatcgtttttccctcatttcccgccacctttgtgcttttccagaaacaaataacaaaaggcccccgcaggggccttccggactacgggcttctcaagtatccgtagtgcgatcactaggtatatcatatcctttcctaaaacatttgtcaaggacaaatcataccctttatattctatggaaaaatgcattttttattcatctgtcattccagtaatccaccaacaaagttgcgcccacacggcgagtttctcttgtgtattttccctatgtctggtaagcttatcttagtaagaaacaaagtcagaaaggggaaaacaaccatgctgatgatcaacaatacgcccaatcttatgggaattaccattcacggagattatctggatctgaacagtctgtacgatggtctagcgaattatctccggttctatttaaagaacaacgagaacatgggagagacctactatgagtgcctgctgggcctgtgctatgacctgcgtcactgctatcaaggtgaccggaacattgaatctgtggagaacaattatgagagtatacattctctgatagatgacctctatgccacagatgaaactctaatccgaaaggaacagaaaaaatatcagaacggaaatctctatttcaatgtagaagtacattatccctgggcactcttctacttattcggcctgcagaacatcctggatgaccagtatgagaccagttggttcgacaatctggaggtcccctatccccgactggaaatggagcgtgaccggaccgtgatccagctctttgtagatctgctctggctgaatctgaaggaaaccttaggccataacttttccaaaatcctgctgaaatactatgaaaactatacagagaccagcctgtatttccaatatccttatgtgtatgtggaagccctgtgccagctgtacgccggcaatgcatccaaccagtgggaacgcagatccctgctgcctttgatctgctatcagcttctggcctttgactatgacaaatttaaccagatgacagtccccatgactttgaaggaaaaagaagaaattctcaattcctacggggacgccagcaaaaatgccgaaggaatcttagatattcatttcatcacctgggatgaatttctgcccatgttcagccattatgcagaggaaaatcccaccatgccggatattatcctgaaggataattttttccggacacatttcggggatgtgaattgggacgaactggaatggtagaggctcacaaatgcctaaagagcctgccatagacagcttttcccagatacctgacagttaaaaagagaatcccggccaaaaggattctctttccctttcctagacacgattcatgacaattcccaacagctcacacccattctgggtcaataattccccggccccaagagcaacgcttttcttcacaaaatcctcccgcaccaccattaatatcccatctgcataccgccccataagggctgcatccatcacacttcccgctgaaggcgtatccactatgacatattcatactgttttttggcgtctccaaggaattcctcaaacctgctgccagataaaatttccgtaggattggccacacatctcccgctctggaccacatccagcttttccatatctgtatgaaaaagaatttccctgcagtcctcctccagaaacctgctcagcccccattctttaagcccttggttcataaagggttccctggaatccttccttaaatccccatccacggcaagggtacgcttccccagtttggcaaagctcctggcaagctgcagggaaaccatagttttcccctcctttggaagactgcttgtcacctcaatgactttcaccctgtcttggtagaaaagctttgtccgaagagcggcaagcacctcacagatctccagtcccggctccagatcccttacctgtattttttcgtcctcatccttataataaagcatttgttcttcctatcgtccctttcataatcacagctcctgctctccggaatggaacagatcaccggaactcccagacagccctgtgcttccattgcagtacggatcttatcattcaacaaatagaaagccactaagatccccactgccaaaaagactcccccgaaaattcccaccaccagattcttaatataggcaggtgaaaccgactcccagtctgtcaccgcgtcctcaatcacataagtctccttcaaatcaatcttccggatggcctttaccccagtctccaccagctcattgacaagcctgctggccagtctggcatccggacactgggctgtgatcttcaaaatcctggtttcattggggttggaaatggtaattaaattcttcaaatccttataattcatgtccaattccagattgtccactacctcctccagaacaggcctgctggttaaaataatcgtatagtcattggtaagctccgctcccatctgcagatcctgcagagatgtactgtgcttttcctctcccctcacataaaccatggcagatgcactgtacagcggcacacaaaccaccagtgtataaaaggcggccgccagaatccccagaacacatcccacaaacaccacccaccaccgccgcaatatataacggcacagagccctcaagtcaatttccatctcgtccggttcctgtgcctgctgatcatccattctcattttctctcctgaaacggctgaaacattaagccacttccattcaagtattgccgtcccgctcctttttccctattttttcaacataaaactgccttaaaccagtataaaacaattttttcgccaatgacttccatatatggcagcaatgccaataaaagtttcgtgaacgacaatgctcccccccactttgtatccggtaccttgaaaacccaatagactttacatttcgattatggtaaaattttagaacagggaggatgataacatgactgatcgacaaatgttagaattattagttgacaaaatgtcaagttttgagctgaaccaacaagaaacaaaccagcatctttctgtcatcgaaacagatgtgacttttcttaaacaggacttaacctcactaaacgataccgtatctactcttaaacaggacctatccgtgcttaacgataccgtgacttttcttaaacaggacctatccgtgcttaacgataccgtgacttttcttaaacaggatttttcctccatgaacgatactgtggctgttcttaaacaagacctgtcagtgttgaacgataccgtatccattcttagacaggactattcctccatgaacgataccgtatccattcttaaacaggattattcctccatgaacgataccgtatctattcttagacaggactattcctccatgaacgataccgtattgattctcaagcaggatttttcctccatgaacggtactgtatctattcttagacaggatttttcctccatgaacggtactgtatctgttcttaaacaagatttttcttcgctgggcaataccgtatccaagaattatgatctgcttgaagagttctatgtttatcaaaaagagtttaacaccgaaatgatcagacatatgaaaatcattgaaggggaattggacatgcataccaatcagattgccaaaaacacctctgatatcaagctgtataaataacccataaatgccattaccacaaacggagtgtaaggtctattgagttttcaatctacccctgcactccgttaccgcaccttaaactttatttttcatactcatagcttgcatgttccgacaacaaatgaaacacccgcttcccttcttcataaaagtaaaattccccacagcaggacgctgcctctaatatggttctggtcatatttccattcatcggtgcctgaagccttttccctgtatactctcgtacccaaatatccagcagatacctgccctgctttaaaagaagccggttccttgtacacagaaggaccctcacccccagataagtagcaagacggtattcccttcccccatactgaatcacacagatgcatccctgaaaatccagcccgccaaagggtatggacgccactgctgccataatggagcacttttgaggaaaatcattggcctggatccacatataggaagacggaaaagacttgcctctgtccatttctatatacccggtacccccggtaaaatcaatctcctgcccattaagaacaacccctccctccaaagaatgagacatactcacaatcccatgcctgcactccattggcaggaaccgaaaaggccccataatgtcatacctaatgggagacagctgcccataccggatcctcccggtcaaagaaagcttgggatgctgtatatttagaaggatacccttccaggtaaaaacattcccctgtgtatatggaagctgcatagaaaaatcctttgtgatcacctgtataaatctttccttctcagttcttcccacaatcagggacaaaacattttcatccttttgatgcttataatagtaaccttcaaaatactcactcaatattggcacctctcttagagggattatcaataagcctgccatccgcctcaaatctggaaccgtgacagggacaatcccagctatgctcctggctgttccattttaaggcacagcccatgtgaggacagcgtttcaaagaaggggtaagaatatctgccgctgcctccatggtgttcaaaaaaagctgtggcgtgagcatgctcctggatggagaaaacaaggtgctccactcattttccctgtcctgcaccagatcacataaaagcagcgccgaaaccatagatgaagtcatcccccatttattaaagccagaggccacatacagattgggggtactggcagaatatctgccaatatacggtattttgtcaagactcatgcaatcctgggcagcccagcagtatttctccttggcatctgggtaatagatggagacaaactcccgaagctggctccaatttccccctgattttcctgtgcgatggctgcctccgcccacaagcagcaggtctttataattccgaaaggacagcccgtccgtggcttcgtccttatacatcccatgaaaatccggtgcagcttccagggcgatcacataagatcgatgctggtacagcttcataaaataactgccgtgccggttgataaaaggaaaatgagtggcaacaatgatcttgtccgctgtaatttctccatcctgagtgtatgcagtgtggtctttgatattttttataaaggtatgctcgtagatgtttaaattctccgcaagcccggcaatgaatttaagagggtgaaactgagcctgccttggaaatttcacagccccttctgtctcaaaaggcagaggcagatcctggacaaattccccggggaagcccaggctgtttaccgcctgaacctcccgctcaatcttctgcctgtccaacatagaatagacataggaatccttttcctcaaaatcacagtccatatgttctgccagctctttgtaggtctccacggccttttcgttggcccttaaatacatggccgccagctctttgccctggtttcttatgaaatggtcataaatcagcccatgctgggaggtaatctttgccgttgtgccagcggtaattccgctgcaaatggtgtctgcttctgtgagaatgtaatcgatacctgcaagcttcagaaaatacgcacataaaatgccgcacattccgccgccgatgatgaggacatccgttttcccattgccgtgcagcctgggaaattccggcagattctttgttgctgtccagagggattgggacatggaaagacctcctaaggaaaaattatggttttatttcccttagttttaccgcaaaagcagtattgtataccctcaatgacaaagcaaggggcggaagggatcagtcagggagaaaggaaattaagattctgattcccgccttttcgcaaaatcagcgataaaacctttcctggcaacattggtcttctttaaatcaattaccactttctgctttgaacgcccactgccatgaaaagtaaccaccactttgtccaaatcctgctgctttaatggatgcctggagctgtcacattccaaaaagcagggaagaatcttaacattatcctcaccagctgaaataaatggacgtttcagaatactgctatcctctggaaaatcgaacgtcattggtattttctcattattcttaccagtattaaaaaaattcacttggttacaaagccgggactcatagtatctatctgaatccgcaaattttattttcacatcgcagcgcgttatgtaaaacggattctggaccgcatgaaaatcaatggccagaattacaagaaatccagttactatttgattatcctctgtgcctaaccggaattcactaatcgatgcaacatccctgaaaataccaaaaatggtcttttttctattctcaaatacctccaccaacgaaggaatccacgcacatgcaccgacaagacctacaagcagtgatataaactccattaccttcattattatatacaataggtttctggtatttattatttcagaaaccattctcctttctgctactatgtgtttatagtttcagtttttcagccgtactctacctacagcttttgtaattacctttttgacgtatgtccttacactatctacaagtataaattttgagaaggctcaaacgcctgcatctactgtaaagaaatcctcccccccttatcattaaattagaacaccaatcattttcaattacctgccgctcattactttcatactttatattatagtgtctaagaacgtaaaggtaaagtaatcgttcgaactcattctccctgcccattcataaactaaactgggcagggcagactggatttctatttcttttttggtcttcctagttttcctttgcccatatcaatagagtttctcctatatcaaaacagggaagccctaggctacattgaaacacgtcatatatcatccctgtaataaagctcccttttactgtgtatcccaagtttactgtaaatactttgcatggtattgctgaccgtggatggagaaatacacaacttcgccgcaatctcttttacactcaaccgttccttcaacaatgcggcaatttcctgctcccgcaaggtcaacgtcttctctgtcacatggacggcctccagtatcgcctgccttccctttaaaaagccttcccctaattgcataattttatatttcatctcctgcatttccccacgaaaaagcaatccttccaacaaacattttaacagtctgtaattttctacaaaaggaaaaagcaacccatctttaaaacacaattccaaagccctttgaatatcttccaccgcttctgtcctgtgtccggtaaaatcagcacctgctgagaggaaaatccatgtatacacctctggaagtaacatatgaaactgatggcattcctcaatcaagttataaagttctgctgcaaacttttcataactgaccgttcgtctcctcatttgttccaggagcagtctcccgtaaatactatgtacgtaaggcaatgcgggcatcagcgttctttttctaatctcccgcccatcccacagccattccggaatatccccgaactgttccaacaaaattgccagatatcccttacatacatctgttgtgtatatacatctggcctcccttccaagatacggacggtcatctatattctcctgcatatgcatataggtagccacatttccattgaaaattgctattctggccattcccagataggcacaatagcaaatgctgtcttgttctagtttttctgcatcgtacaatgctttttgaaaacacttcaccgcatctttttcaccgccccttaaaagacaaatttctccctccatggcatggtgggcacccatcccgttaccttctgataattgataatataaaggcatacctgttctcacttcctggaatatctgttccaatttccctgcttcccgccagaacatcccaactacagaaggcataccgaaggtccaggctgtatgcagcgaatatagcttggtaggtcttttcatatactcccatgccagcttatggtatctgcacatttcctgtacatcattgtaaaccagaaaggacttcatcaaatagaactctcccatgagttctgcgcctcgctgctgtccataaatttcaagcttacccataatttctttcatcagttccaaatactgcatatgaagcattattttcccctgtacaaacagctccaaggtcaaactaagcgccagctccggatttttcaaaagcagatattggttctccggctgaatcagctgctttacgatggccccatcctccatgcgcaccagttcaacacgatcatctttaccaaaaggaatctcagtaaatgcacggatatctccacactttccatatagttctgctgccagcagatagtttccgctgttttcttctgcttttgctgtctgcctccatatagctttctgatcctcctgtgataaatcacaaaacttatccctgataaatgtaagaagcaaatgatgaaaccaatatttgtgacgctccgcatccagtcgaataaaatcaattttatccaaaaaatctctaaattcttcctgagatccctgaactccacaaatctccattccctcttttattgtaaaactatctgtcacagacaggtacaaaagccattttttctcttcactgtgcaagcttttccataaaactccctccataagaacagaaatctgagaagaaatttcaaaatgtccatactgcttccaactctccagttgaagctgaaccgcagccacataaccttccgttactttccatatggtatccagatcttgcactttcagacggatcccctcctgaataaaatacttcacaatatccgttttttcaaaataaaatgtctctgttgaaatacagtaataaggatatttggcaaagaaggactttccttcatgcttatatggctgggtgatcattataatatgcagattttcacaatgatggagcgaaaacgcctgtaccagtccatctctgtctgctatatcaaagagctgataatcatcaatacagaaaatcgtaggttcctcacaagaaatataacgcatctgaacagctatgctttccatcaattctttgtccggcaaaggcattgaacccagatattgaccaatttcacaatctattttgctgaactccttacaaattcctctccaggtattctctggccgttcacccatacatgtataataaaattgtctgtatttcccaaatgtttgtttcaaaacatattcatgaatagctgtagattttccacatccggaacctgcctctatgatcgtcatgggatattcaacgatacgatcaaatctctttttcaacttttctgtaaaataatacatctttcgcgccccctcatatatagtattataagttcccctcctatttttgtaagaaaatgttttagaatagtatgttttatactattcaatgttctccatctgcgatttataataattagataaagaccccattcttatttatatctccaacaaatacgtttatgggagaaaggaaggaatttatatggatactaataaattaaaaattgcagttatcgttaacaaatcctgggagtttgaacctttttttaacgcaatcacaaattccaagctcaaaaatactgcattaccattgccagaccaagtcaatatgcccttctctaaaaaaggaattaattatcccctggccgtgtacaataccacaaagcataccatccagcttcattgcattgaaaattggatgaaacccggaatgcctcaaacatattattccaattcaaaagaaaaagttccctttatcaatggaatcattcacacttataggcctgactttattatcagtgtcagtaccgcagagtctactcctgatgtgatgccaaataaaacagaatccatcaacggttctgtactaatcggcagtaggttttttatgtttgatgccagaaaattcaatccaactcagccttccccaagcgatcttaatgttcagacatataatcaatctgagtttgataatgaaaaattttggaaacctttaaatgacaagatccataggtgcacaaatcgcttcattccatgtttgaaagcgcctgccaacaaaatgatctgtactggtaattgctattatacatcaattggcgttgttaatatagttgaatatgccggatatgcaaagggagacgcggcagcatatgatacttttggcaataggttcaaaggatcgaaccttataccagcaagcatagagaccacacatggtattgtgaaaatggttgcaggcactatacctacacttttcgtatcaccaatcactgaccgatatttacacttcaatgatgatgtagatgcagctggtatccagaattatatcgcaggctttaatgcaggaatcgcagtgagtgaaatacttgttgcattagaaaacttacttccataaattttttacccggacagttgctttgaattgtccgggtaatctttttaaaaaggtaggcatgtgtaaattcacacgctattctaatttcattcttagttttcatagaaatggaatacaaatactaaaactgaagaagtactttccagtacaggctccacttgtcaacacaacctgccatctggaaatgacaaccggctaatgatatatttccagaatgtaaagctttatattcctgacggagtccggtatgatacgctctgacaacgcttcaggtattgaagaagctatgatgcggtttaagctggattaccagaaagagctgaaaaccgtcagttccaacgtggacggcatcctcgaaaaagaccgttcccggtctcagggcggagaaaaagcgcaggacatctcataacgagagcctacgcttttcggcaaaatatttaatcactcagctttttcagagtcgtcctgcaaggtatttactgccgatatccgttccgcttttatttccgtaatcctcttttcatcaacataatgcgtcgcatacaaccgctcaatctcagggtttccgcttttgctgaaccggagcagtatcgtcctcttcatgccccaccgtttataatgggtaaaggaaggcttgtagccactctttttagcatagcttctgatctgcgccatgatagatgaaagtttatgcaggttgatattgcacacccgctccagatagggaacccggccaaatctccagtcttcgtatttctcttttgtgagcacacccacatcaatcagcacatccaccggagttgcaaatcctcgcttctggcattgacgatagatggatgaattaaccttttcaatcaattctttttcgttcatactcatctttttcccttttcgattaatctggaaccaccattgccagccacctaaacttctttaacaaatttactattgcattcaatgaaacgaaagtccactggaacagtctgcgtccacagttcttcaatccgaatatgatggcgctccagcatattacgacattcctgagctttcagcttacagaaatctgctttaaaattcttatttcctttgctgtgtgtcaattcgggtgccgttttcacatctgaacatctggcaagttcttcctctaaattgagtacctgtggcaaataaatgatattaactctgacacaatatgttttgagcatctgaatgttcttcttcagatagtcagtaacggaaacatccgtatcaaaaacaaaggtaacgattgttcccggttgtatggtaagaatctgtgattttggaattagcttctggataatattaaaaacttttacctttcccggaatcagcttggatggtctttgttttaaggcatttatcaactgttgttcgcaggaaccctcgacataatagatgcacttattattcatctacccaccccatttccagctcatcaagcagggaatcatccggcaaagaactaaacacatcgttttctaccgcactcctgatggaatctgtattacgcttcaaagcatctgatgcggatacgacggaaatccgatattcaccatcttccttattttttctcagaaaaacatatgaatgttttggaagattcagatcaagcatatcggtgttatgcgtagtaaagatcaactggctgttaccgaatatcctatccaacataattccgaaaatacgacgttcgatatcactctggatataagaaaaatgttcatcacagtaataaaagcaattctctttcgtaagcatggaagcaaggaatacagccacatcaattccttccgctgtaccgctggacagcacttcccggttcaacaacttcccatcctgaacgataatctctgtatccttacgtctaatgataaatgtatccttcaaatcctttgacagcctgacatctgttagcgtcggatcgagtgtacctatgacagcacgcaatgttttaagcagattgcccttatttgctccgctcaattttaatgtagtctcaatctctggataagcaaaccgaaatgcaagctgacctgtcctttttttcagacttttgactgttttcgttgcctcagcagtatggtctgtaagctttcccacacatttttcatatgaatccattttttcaatctctgcacatgaatattgaatctttacatcagaaacaatgccatctatatcagctgacaaccgatggagtgtataaccctcattcacaaaatcaatagaaaaggaagcttccgcctctgatgtcatttcaaaaaggattgcaggattcccggtattgatatatgagaatatcttcagcaatgcttttcccaggcttgtttttccagtcgcatttgctcccatcagaataactgccttcttgtaccggaagcgttcccttcctaaaaggtgttcattctctataattgaattgacgacctttttgggataggtaaaatcaatctcaaaatcacgaaatccatatattccatcgagtttaagatgtaaaacaaccatattacgaatcctcatttcttcgttatttacgaactaataatatgacaagttggtcaaaaagtcaatcccccaaaatgcttcagtttccgcagttctatccacacaaccttgagtttagctgtgttcttataaacaactttcaataaatgcccaaaacataaggaatcgtctttccaggcatctggagaaaggtacccctacaaagtcggctgttcctatcttcagatagtgaaaaaatgggtccctgagtattccgacgcaatagtgcatgcttttcggaaattcagagcacccttttccggaaaagcagtgcatacctttccgaagcagagtgcagttgtttgattagtactcagatggaatctctattccatgctctgtcaaaagcgtttgtaactggccaatataatctcgcaagtgctggatttccatccagttaccatgacacagtttatcggcctcctccaattcgtggcgggttaattcataatccatccacttgatacatttatggtctttactaaaaacgcaataattagtcattaacagctcctttccgggaagctttgatgccatgacgttccctcatggatacacgaccattaatcattacctcgtaggagttatgaatgatccggtcaatgattgcttcgcaaatggtagcgtcgcaatcacttccgatgcggctataccagccctttggttcaaactgtgtgcagaagattatggagcctttcacactgcgggcttcaatgatctcaagaagctcccgtgtctgctcagtggataccgggcttaacagaaattcttccagaattaaaaggtcaatcttctgataagccttgatcacctttttcagcgtgccatccccctgtgcaacaaccagctcatttaaaagatccggcagacgtacataacgtacttttataaagttcctgcaggctgcaatgccaagtgcgcatgcgatatatgtttttccatttcccgattctgtcacccccgtgacacaaacttttttaggaattttttcttgaaaataagggcttcccactccatcccttcaaatacaagggcagagcgtgtctcgtaagtgccaaaaaatcggtttgttagtgttatataaatgctatactattttccactaaacattgtctgcttttttcttatgccaaattaaagaaatatcaagaaaatcaataaaaattccgtaaagcatagaataattcaccggaatctcatactgcttcaaaaattggataatattacctataagcaaatgccaatctcctatatatgatccctcagaacatctcgcaaacatcgattcgtaaataatatccagataatctttctttatatcagacttctcatacatcgaaaatatttcaacatacggtaggcatgaataccaaccattcgtatattttgccacatctaaataccctattttttcctgtttaatatagtcaaaatcatcctcgtgaatatacccgtagtttaatggaatgtattctttcctctcttcacccgcatttccataatattttatgccacgaagatctaactccgaatacaaatcatatgacggagataatattgaatatccataatattcaataccatctaacaccattcctttatattttgattgcatagcactagcaatatcccgatattctatgacttttgaatgataataaatacttaacaattcagtaagctgttcagcaaaatctgatttattaaagcaattcaacaatgcaggctccagttcccaaaatcgtatccgactattcttatctgaaaaaactttatgataaatcagtttattagtaaactcaattcctttctgattaacgtaatccgttagcaaatgagaaatccccttgtctgattgtttcataagtctttctaaaagttcaaaggactcgtcttcttctataattccttctgtttcaaatgtaagaagtgctttgtttattgtatatacactgtaatctttatgttgataataaacagaccatgcatataccaaattttcgatgtcaacatttcttttttcataatttgccagtttcaaatacgatgcagctaaagtagttgcttcaaaagaaccatctaccgctccttttgttataatgtctttaagagaacaattcctaaagatattcttatcgccaaaataccctagctcgtgcaactggtattttgcagatgacaaccccatatcaatccggaaatggtctatattgtattttttcaattcctgttctatttcaaatatacaatttttatctccgtctaaatatgcagtaaaaacgttataaaacttatcctctgagtttccttaaatccatatgctaacgaaataatctgcaagaatcctatcaattcgatcatcttcatgattttgcaaattcttctcaatatctgcaaatttgattatactctcttttttctcataaaatttgcaatccacattaattgtctcaatcaactcataatactggcttgcgcttatttttttattagccagatatctttcagccattgtttcatgttgtatacaaacaaggtacacatgccaaatataggctgaactaaaaatacagttctctattccttcatgtgaatgcatatatttaagcatctgaaacaccatactgtccgaaccgaccaaatcatttctctgagagatttcaaataataacgaaaacgaataaagttgatatatatccaatatcccttttctaccttcaagatgtttttgcaattgaagatataaactcgcaatggaattataatcacgtgtagaatgcattaatcttttaaattcttcaaaatcagcatatttctttaatatttcatcgtagaattcatcgtctaaaggaaaactctgcattctatccatatactctacagaaccattcaaaatacttttacgtacaatatctaatgttatctcttttctttttgaaaatgaggtaagcttctctctcaaatacgtattaaagctatcatggatcaatgaaactcgatttgctattattttgaataaatacggatgagttttcacaaactcatgaataacatcaaacagctccggatctgtataaaatgttttcaactcattccaagtaaaaaagcagttacctacagaaaaaatactgattgcttcacttggtttatcttgattaacaaataaaccatcataataatcatttatctccctaattgatgtgccagccgtattaacttttccattcaatatatagtctgatgcaacaaaatatgtgatgatgggatatccatttgcaatattaaaaatttgtgtctgtatcttataatcatgtatttgatgaaccatatccaaataaactctagtctcatctatcgtccaatctaatagaatacttttattccaagtcaacacttttctaagcggtctagaaagtacaattactctaatattttgaagtctatttataaaatcaacatattgctctaattgagacgaattatagttttcaacatgatccaatccatctattacaataagtttatcttcctttcttatcatatcaattaagtcattaataataactcttttagcagatttatagactttgataccaagttctttaataaatttttcaaactgaaggcgattattcctgtacggatcctgcgatccaatccaaaatctatatacaatagcacctggatacttatcacatatttcattaacaaaatggcttttacctacaccaggttttccttcaatacaagtaacttgatgcggaaattcttccggaacttgtctcaaaagaattgtttcatcttctaaatcaactgacagttctataactgctggcagttcttcaatagagatctcaaatttagcatcctgtgtaacagcatcggcttggtgaataatctgaagtgccctttcatcggaactgaacatattatctattctctctgcacattgttccggtgtaagcggaatgattattatatctttctttataacacacggcaatcccataaacaggctatctgtgttaatcaaattagagttaattaccaatatattattatcacaagaatcataatcattttgattccctttaacagtcactaaatggtctgttataacaatatcatccaatgttgtgcctggatagttttttgcttgaatacgatatgattttaatccaaagtcttcacaccgaacattttcaacatatatatcatcaaaatgtttcgtgtctgttgcttctaatgttatctttgatattttacgctctgtgtccataaatgctaagaaaagtataaaaatactttgctgatatgaatatcctttcaaggcatttctaggaactgctcccataattttatttgctctcccttcttcaaatgcattcttcaaactttcagactttattcttcctctttatcacccagatgacataggctttggtagcatcaatcacttctatctacatccctgtatctttccctgcttcatacattttatttttacatccgcctcgatattatttttgcctgcaaccccttccctttatcgaatctaccgattaccccattcgtatgattatagtacagcaaaattcgtattttttcaaccaaaatagaggcttgccacctaagcaacaagccccgcatctgcgatattcacttccagctgatcctgacctcatctccgaaatgaacctcgatgctctctacatattcatccagaagtttctctgtcaatctcgtcaccgcaaagctctcatgcaccttcacccggttcagctgcctgaccttgtcctccgcctctaacagttgctccatcagctcctcatgcttctttctgaacatttccacctcatcgatggatgcatcataacttttcttctgtcccagggcataggcttcaaactccgccatcctctgagccttggctttttcaatcgccttctctgctgcccggcatttctttctcaaagcctccgcctctgctgccgctgtttccgtcatagcctgctcggttatctctccggaacggtaccggatataatcctcgctgccggacttcttcaattcctcgatcttataagagatatccgtaatctccttctccatttttttcttctcattctcagcctgccttttgcttgcagtgaccagatccttctgctttgtcgatgccagggaaaactccttctccagtgcttcctctaccagccggttcaatatgatcagggaaatcctgtcgttatcacatctgcggtcatcaatcgtttctttgtttacgcatctgtactgataattcctgaccttgccgccggaacggttggtaaacccgcattcccttgtgaacttactgccgcacagaccgcaatagatcagatccttatagatgtcctcttccatcggcagattcctggatgaaccggaagagaacttctgagaccttgcttcaaattgtcttgccacttcctggaacacctcttcggaaatgataggctcatggttattctcacggaccttaagctccccggtcagaaccttcgtgcttgtccttccgctgactcgttcgccgtccttctgctcacagatcagccacccgatatacgcgcagttattcagaatctggttcagcgttgccttgtgccagttatgcagtttctctccgtcctgctgatgcacatggccgtatttgctataatcgctcggcctgtggatcttctcagtataaagccattcgatcatctccacataaccctcgccgcgcaggaaccggtcaaacaattccctgacgatcaccgcagcttcctcattgatgacaagaaccctgcggttgccttccttcactacatcatatccatagaccggatgacaccccgagaagcatcccttcggatatgcccgccgaatacaaagactatggctattggactgtgccttatttccagcagaaagcgtctgctatcggccccagcacccgtgcattgatcgatgccgtcattcggaaacacgcttatccggtgcagtcattccgaagctgctttgggattctgcggtatgcggaaaagtactcgccggaagccctggaacgttgctgtaaagacgccgttttgtctgggaaatgcaactattcctatatatctgtaacacaatctcaacttaccataaggagccatcgcagagtacagcgtcacagagcaaacccaacgaagatgctgcaatagccatatccggcactttcaaagatgacgacagcaagtattcccttaagaacctgctgaagcgtcaggaaacggaggccggtcatgaagaatgagactaccgatatttatgagatgttggacacactatccctgccggtagtcgcccagcgtttcgcagaactgtctgaaagccctgaattcggctgctataccgctttgcagttccttcgtgaggtcttggagcctcaatacatagaaaccctcaataagcggtttgaaaccaatctgcggctcagcagcctgatcaataagggggctgtggcggagaatctgaaaaccggtaacgggcgcatctataatgatgccactgttgaacaggtcctgaaattccacttcgctgagaaccggcagaatgtggggatctatggagtcaccggtgctggcaagtcctatttcctgtctgcctgttgtgtggaagcatgcaggcgtaattaccgctgtaagtttgtagactatagcgatctgctggacgaactgattgttctcaaccggcaggaagatctgaacaagtaccgtaagaggatcaggtactatgcacggattcagctgctgttcattgatgacttcgctatcagccgatattccgaggaagggatcaagatcctgtaccatctcataaagcttcggtatgaccttgggacctccaccctcttcacctgccagtattctccagatgaatgggggaaccagctgagtgatgagaaggaatgctacggcaagcttgacggaatccggcgcaggttgactacaggatttacctactgattgagaaagcatagccttctgggacaaggctcgatactgattagcagggcggagccctctctctgccctgccgatttctaaaactggccgtttaatatggccctgactggccggaaaatgcggccctgctggccgcagaaagtggctgtttgcaaaaactgaataaaacacacattttgaaagaaaaggagcatattctcttgccattatcttcatcactttatcatatctgaggaggttttttgccctttctatattatatcccagtcaaatgagcgcaaactctccagtcaccttgcgtattccctttagctgaaaataggtggcccccatcgctctttttattgtcccgaacggatgctctgacaagcacatcctctttgacattttctgccggtccggcttcagaataaattttactacttttaccttttcataatgcacttttttatgcctttacagcatcgcattcttttccctccgcttccagccattccttacacgctttctccagtgtatccttcgtaaaatcaatctctttccattcgcctttttccttataacacttattcctgtttagacaatgcctgtaggcatttttattcgcatatcggatatccccgtttttcttgatacttttctgcctcaggatttctcccgatggacagattcctgacaaaatatccttcctttgcccgctccatctgctcctctggccttccgtaaatatattccgctttctctaatgcttcactcttatcctttactttccgacgtaattcttctaccgtcatttctgtaataacttctttgtatacttccggaatctgtccgcgatgaagactgttctttaattcttccgactttgtgctttctctatctgcctcagactcttcataggaaatttctaattcatacccgtcttttccaacggccattataacatggggaataatcccattttccaggcatctctccatatcttccgcattttcatagcctttgtctgccactacttccagaatcccaccctgggattctttcctgatgcccgccatggtcggattcagcataccatgataggctaccgcaaaaccatttttatttttcataagtcttgcatccgcatctgtcagtgacagctgtgatgctccggtttcctccatcagtttctgataggcttcatatctggcaagacgctcctgcgcttctttcagtttctctttaatcacttttctggtaagcttttctgggatttccccctgtttgttctccagctcacccatttctttcaatatcctcagatactcatctgtatgggcattcactcattttatacgatcatccagcttattcttggtaaagttactgcctttggaattgttagcctgaaacttacttccatcaatcgaattaaatccccattccacagccccggcaattctccggttgaattcatgaaatatgtcttacaggctgtcaatgttattttttctgaaatcgtgcggaaatcaggttctgccccacacatcatccatttcacctcaagattcactttacaactttcagccagttttcgtaaggaacggatacccttacggtttccgtaaatataaagcttatacattcctttcggatcatatgccggacgcccttcagccgcagattcctttaccccatattttataagatcaaggctgtttacaaaagcatctatcagtcttgcaatactctcaggatccataaaagaatcccaggaacacatcatcatttgagtacgattaaaagtaggaacatacggaataatccttcacctcagatatcgaatttcttgtttccattatactctttttctgatagaaagtcttgtattctgtttgctttattcagttttcaatatgcaaatttttctattttaaacacccttcgagagtaatttaaccttatggctattagtttctgactaccttagttttcggacagtctcccttatacagatgttaactcacatttactattaacaaactccttctgagttttctagtctcttctataaaaaagtcctttccacattatttttccgatctctccactttgccataacgctgttattgtatatgtcggtatattatattcaaatataactaattgttgtgcattattataacctaaagcagatctcctaactctcttttgtgaccacatatccttatatattgatttactaattgatttactactttgtaacaaatgtaaaccaattctttccagaaagttaatagaattatttctctgctcatcattattaaacaggtctctattatcagatattttagcttcaaatcctttattatatacaatttgtattttagtcaaaccaattttttgtagttctttgaatatatatttctttacttttacattaaaatatataaatcctataacaatattaactgtttttaatttttccttttctaaatcacctaattcttttacgtgatgttcctttgttgccctctgatcaatacttaagcccatatattcttgaaaaattgaaacaatctgatgtccagaatttgctccatcatcaataaaacaaagtgttttataatcttctcttaatgctgaatctatgtcattaacacaattattttttttcaaataattgatgagacgatagctactatcctcttcttgtccatatttgataatggtgtttttttctttttgaaaaaagcatattttatttaataagctgttcaactcgttaattatttcattttcatctaaataaagcacactatttaaaatatcaattatcccctgttttatagagtctttttcccgcttactacttatataaaatgtatcaacctgatttataaattctataatctcttcctttccaataatattatttttgtaactcgaaaacttttcaattgttctttcaatacacacttgattcatttttaacaccatgttttataaaatcatttattagtttttccatatcttctggtttttctaacatttcattgcaatatttccaagattcattagataactcattagaatattttgcatgagcataatatatcccactcctttttgccgctaaataatctacatccgtatcaccaacaaataaaatatcactttttttgatactatatcttttcgacaaatagtcaataaattctgtagacggcttaggttgcattaaatcgcgcccacatatcatactaaaactatttttcaaattcattttttctaataaagaaacaatattttttgtttttctgtcactatatattgctaataatgcatttttatctttacaagaatttatagcacaaataattgctttatttattgaagccattttctcctcattgcttaagtactccttataacaacttaacaattttttttcttcacaaactgttaaattcttttctattccgataatctttactaataattcaggataaaacaacgacttgttatacaaattaatattatatttttccatgcctagttcttgtacagccctattcatggctttcttagcaatttcttttgagcttaaaatagttccatcaaaatcgaatattatgcacttcatataattcctttcttgtttattataattcaacttcaatttcggcattattaaaatagtgatcgattatatctataataatttgtgaacttgtatcaggatcatcctttaaatcatttaactgaatatatttttcatatagcttatcactcaaaacagctctccaatattcctcctcctttttatgggtgattaaggatatagttccagtatatggaattgccaaaattttgcatttcttttctcgtgcaatattaacttcctcctctaatccatttctcccttcagtatcttcccccaacaataaacataatttttctggagaaataaatcttcttctcatttccgtataggatgccccagcataaattattttccctttttgtggatttgtactaccaccattttctctataataaaacacaatcctatctaaatcttcctttatatttggacacttttcccacataccttctgctataaaattagatatattaattcctccaccactattatagctataacctcgttcagccaataaatgaccaatttttatacataattctttaaatgtatcatccttataaattcccattcctgcaatagtttttcccatcttgctaatatatattttattaaggaatttattaatatctttatatgtatccatttcaactacttctattccatagcgattgagatctcttttccaatatttatatattcttcgtgcattctcttttgcgggtggtactgtaaataatagactaggatgccctatttttttgtaattccaaatcgaagcccaaatacgtctcatattaatatcattaaaacttacaccaaaaaacaaaaagcttttattgataatgtcattttttagcaaattataaatatcttttctagatttctcataattttcatattgactttctaataaaattatatcatcataatcatctgaaatattagacagacttccatgcatcttaatcaattgagattttgataaatctgtattatttaattgtctgtcattagtaactacttctaaatcataatttcctttatgaaaagctttttctaataaatcatcataattagtcgtccaaatccttcgtgcccctagtttggatattagataatgagctttttgaggatttgctttttgaattttcttttttaagctatatattagcatagaatatttactcttactctctccacagatatattccaaaacccgctctaatgggattccatctattggaatatccagttctttagcaagcggttccactaaaccgtaccagcttggtaatcctgcatcaaaagacaatcctgcacctacaaacacactaagatttggcattaaattttgaacacaatactctgctgcttctttataatccattactatctccttattcctatttataactctactcaatcgtattttctttaatttcaaatcactatacagaacgcacattctttcctaccattacattcaaaatatctttaatagcttttgctttttcctttgtcagatgttttctcggctatttttatttctctaacacatttggagtatcttacatctacaattatttaatttctcgttacctctatgtgatatctgtagtatatgtattgaaatcatatttagcttccattaacttcttaatcatcttatagacaaccttacttctttcggcttatatccagcgacttttttagaaatattataaagcggctctttgccttcatactcccctcacttctacgttaatcacactgttaattttattgttagaaagcattgtaaccatctccacggatatgcaaatgctagatatattaaaagagcgatcgaaagaacattgcattgcgttagtaccccgtgatcaggtttcttaacggcgattataattgtctatatggtaaagatttgaggcgtagtttaaatcaattttatgattatatcacgagataacttgccacagaaaagagtttgaaaataaaagtcaaaccattcgccctagtgtagtgacacgaacatagccaaactaaaatctatccagattacagttctggatagcgtgtaaccagtttggttctggcatcctttgttgtgaacctccaatcaacctttgtgtagctgttgtaaccttcactttcccaggcagatagttctttgcgtagtaactctatgctttcgattcttctggatagacactggcaagtcagaacatttaattctatttcagcgatatcaagccagctcccgtgtttgggcgcgtaatgtatctccagctttcttatgatacgccgtgcttcctcgggtgggaatgccttgtacaatgaagaagccttgtgggtgtttaaattatccattacaagaataatcttttctttatctggatacataacatctacaagatatttgatctcttctgcccagtcaattgctgggaggtgttctcggacacttacatgatgtctgcctgcaagtacttcaataaaggcaaagatacttcatgtcccgttcctgacatattcagaatcgatctttttgttgtcaccaggacgcattgcccatgattctctcgattcgctaagaagctgatatggtttttcatccatgcaaacaacagggacatctggattaaaaggtaattcatatacatccagtacatcttctatgaaggcgataaattccgcatcaactatacttgggagacatcagtaatcgctacagtgaggtcgaagcctgtttttttaaggaacgtcggattgcttccctgctgattggctcgtcaagttcaaccttcatctgctcttcaagaagacgcattgtccagcggctatggccttccggtaccggaccacatgcaatttcaattatttttgcttccgtacgcccatcaaccttacgattcgcattattaatattcatgttccggtttgtttttaaaacagctgcaatacctccggaagcaaagacggatagaaccatagctaccgttgcacggctaacacgacagacttcaatacattaatcataagtcattgctggcagagggttttcatcaaggttaattaatatttgacaacgtgaaaataaagtttgagtcgtactttttttctcataaggctctttagatactttacatcgctgtcagttaacaatatttgatttttctttggtcttcccatagtgatcatctccatttatatgtacagtttatcatctatggaaaattatatcaaagaaaaacatttagttcaatcgtgaatatgtcgacacacttgaccattcttataggtgaatagtttcctgacatttaatgctgctattttacacccaaagaaaagtctgcttcgaatgcatcctctaaccggcatccggtctgtatgatagattcgccttagtatagaggggattgtttcgactccgtttcgcagatgtgccaaaagatgaaattcttctgttcccatcattcgtttggttcttgcccgaaattgtgctgttgctgatattgtgagggaatatacctttttgtggactttcacccggcattgttctttataaggacagttaattcatttctcttttggaaatgagacatagatatgtcctccgccacccttactgtggcagctgctctttggtgtatgaccagcaggacatttcaaaacacaggtgccttcttcattcagtaggaagtccgcatatctttcaggaacttctattcctgttatggctgttgtaacaagttttacgttttgcttctgtgccaggcggctttttcttcaccggagtatgcaccatctgtgacaaccacagattcttcctctgaatggccatttctctcaaggctgtctttcaaaaacttactgtcagaatagttgttctgttcaaactgataatccagtacaacagaaccattctcacctactgcttcatcaacatctgccacatatcctctatgttgctttcctgctttttcgcagaacgtggcatccggatcggagggattctgcagaacggaagaatccattgtgccatcctcttttgtcttgaggcggcggatggtatcttccacaaccgtctgctctgaaagacatcttacaagaagttgatactctgtgacatcagcagactcccgaccacatgatataagtagtttatcggcatcttccaaaatcacttttatccggtctgctgtttcattgctgttgctgtaataaaatgtccggttaaagtcattggaatcataatagtgctccaatcctgtcaaaagagaatcctggttgttcctatgcagatacatgacgaacttagatacacaggtatatagcaattctgcacggcttagatttttaatatctgcttcaatcatcagggagtccatacggcggattttagggcttatattcataatacgtgcaatctgcttacttaattcagtaatacagtcatggagcagatcaatgccataagctgcttcgtaattataacagcgttcacggaaacggctcagtgttttatcactgagtggctgttcttcataactggttgtgtgaagtgcgtactggtaacgggtatccagcatcagactttcaacaatttcgtcatccgatacctggaacatctctttaatgattaatgcaccgacacagatatttaccggagtcttggcacggcactgcgttctggatgaataaagcacacgaaaaggttcttcgtcaattgccgggaagatatcttctgcaaaaacttttgcccatgatttttcaagagcttttaattctcgggatgtaagattacttatgctgtcggttagcgaatactgttgtgaatcatttgttttaaaagccattatgctgtcccctttcctgatattccaattatatcaaagacagagggaaacagctaggtttgtgtgaaattttcaaggtactatatgaggtctatttgacccaacatcatatattttgagtatatgatgttcaaacttaggttcaatgtttttgacctcatagtttagcatttcactgatctgcttgcatgtctctggattgacctgtatactgtcatcagtatatagaaagaaaaagggttccagagtaccctccgttgcaagtcgtgtactctgaaaccctggcattaaaaccatggttattgtatcagattacacgctaacttacaatcacgaaaatgatattttttgttgagagcagcgtcatatcctactgcccggtctgtgcagagcagctttcctaccgggactcctgcgtcaggattatgcggctggagggcgggatgagacgtagattcctggtccgcaggctgaaatgcagcagctatggaagaatccaccgggaacttccggactgcctggccccatacaaacattatgcatccgaagtgatctccggtgtactggatgggatggtcacaccggaggatgctgattcctcagattatccctgtgaaatgacgatgcaccgttggcattactggttggaaaacaaccgcctcaggatagacggatacctgaaatccgcaggataccgtctgctgggattctccacggaacttctgggatcccgggtgccgctgctcgataaactgcaaagttcacagcctgaatggctggaaacgctgctccggttcctttataattccggcggctttctcgttcctgtttaatgtcctggctttgcaccgactttgttttgctgtcatcgccgctgtatggtaccctccctgcaaaaggaggttatgggcaatgaaaacaaacgaaacgataaagtggcaggaagaccaggcactgcagcggtaccagctgatcgctcccctgctggatgaatcactggataacgcaaagcggatccaattgagggagacgatcgcaggacagaacgggctgtccccacgtactctgtaccgctatgaggctgcttacaggcatggtggatttcccggactgaagccgcaggaccgggaaacaaagcgctccccgaaactcccggaaaacttcgatgaacttctggaacaggcggtccaattgaagcgggaagtcccgaaacgctctgtccggcagatcatctatatcctggaactggaggggcgtgtggccccgggagtcctgaagcgctctacgatggagcggtatctctataaagccggatttggtgtccggcagatgcagatgtacaacgatgcccggaagagttcttcaaaacggttctgtaaaccgcaccggatgatgttgatccaaggggatataaaatatggcataaaacttcccatcggcaggaatggcgctatggtacagacttatctttcttctgcgatcgatgaccattcccgttatgtgatccagtcagagttctatgacagccaggaagaatccattgtggaggataccttccgcaaagtaatccttaaagcaggaaaatttgatgcctgttacttcgacaatgggtcccagtacatagcaaaacagctgaaactttccatggggaaacttgggatcacaatccgccatgcccccatagggagcggtaagtccaaggggaaatgtgaaaagttccatcaagtcgtagattcgtacctgcgggaagcaagggcgcatcagatccggacactggaacagctgaaccaatactggagtatctttctggaagaatactaccataaaattccccatgaagggatccgtgagtattacgaaagcctgggcagccctgttcccagccaggggatcacaccgctgcaggaatggggaagggacagccgtcccctgactttccttgataccggcgtagtcgcggaagcattcctccaccacgagacgcgtctggtagataaaggcgcatgcatcagcttccagggcaagaaatatgagacaaagccttcccttgccggctgcaaagttgagatttcttatgaccctatggctccggaagtggtcaaagtatactatccgggaatcctgccctttgaggcagagccggtaaagatcggggaattctgttcaaaggtcccggctccccccgtctccatgcaggaacagaaaacggaagtttcccggttcctttccgcattggagaagagacatgcacagagcaggcagcaagcagctgacgcggtctcctttggccagtacaggaaggatggtggcggcgatgtatgaggcatttttccagatggggcacactcccttttcaaggaacacgccggttacagccctttatgaatcgcctgccatggccgataccctggggaggctcgcctatgtggcagaccgccagctctttgctgttgtcacttccgatgcggggtgtggaaaatcaacgctcatccgccggtttgtggccagccttccaaaagaggaatacctgctcctttatctgtcggactccaagctgaccccgcgatggttttataaagggatgctggaccagctggggatcgagtcaaagttttaccgcggtgacgcaaagcggcagctccagaaggaagtggagatcatccggggcgtccaaaagaagaaagtggtctgtatcctggatgaggcgcatcttctggagaaagagaccatagaggaattccgttttatgttgaattaccggtttgattctatcagcccgatggcgcttgtccttgtcggacagacagaactgtgggataaactccggatgcagcgctatgcggcagtccggcagaggatcgacatcaactgtgtgcttccccacctggaccgttcggaaacagaacggtacatccagtcccatctggcatacgctggcggcaggcaggagatttttacagagaaagcgctggacgatatctataaggaatctaccgggatcccacgccggatcaaccggatctgtgaaaagagcctgatgtatgccagccagcagggaaaacgcctgatagatgaacaccttgtccgctacatcattgaacatgagatgctgggaggtgacacacggcaatgatcacatttacctgcaaaagaaaggaatgttcgccccggcagtgggaaggcagcctcgagatcctgaaaaaagggaatccttgtgaggcagaaatctgtgccagagggagctgtttccacctgatcgtaggacggcattcttatgggaactatctgtatattcctaactgggatgtaggcacagagctctcgtcgctgacagatacattctggaatgaggagcgccttcggcattacagccggatgaaaaaggcagatgcctgtaccatcgtatcggcgcttcagatactggcagagcatggctgtatgaactaagtctttttaatctggggcggttgtccgcctcagtaaatgatacgatcttatgtcagagtttttggcaatctcatgtcagcatgacagagcgaaatcatgacaatccaggagagcattaacagttcaatacagaaacaattaatgtgattttacttttggaaaccttttgaccccaatatcattctattatacctctacataaaagaaaaagctggaaatttggggagtgtatattccgtttaaaaaatggttcttccgcttttttctgttttcttattgattatctatacccatttgctatgatatattcagaatagtttactggaggaatcatatgcgtataaaaacagaactggaattacaacgcttttatccatcagagttggagagattgcaaatatctttcaaacagattctgagatccatattaagatgttttcccggttaaaaaactgtacatgccccaaatgtggaaccgtttcagtccacagacatggaacttatgaaagaaagattcaggatctcccaatccttggaaaatccacctggcttttcgtaaactcatatgagtaccagtgtgataacccggattgcgatatcacgacttttgttgagacaattaatgggtttctgcgttactatagcaggatgacggaccgttgtgccgattttatctgtacactggcaatgaaaaccagctgcgaaggctgttcccgcatctgtagagccatgaacctcaaaataagtggggacagtgtgatacgcctgcttacaaagcgttttaaacatacaggaagaggtaaaatgtggatgtgccattggtgttgatgattttgctttcaaaaaaaggcttacttatggcaccatcattgtggatgaggctacccatacacctgttgccatacttgacggaagagatgtccatgccttgaaggagtggctgtccaaaaataaacatgtaaaaactgtaacacgtgaccgcgccagtgcttatgcagctgcaatacaagagatcctgccggatgccatgcaggtcgcggacaggttccatcttggatataccggtactgtgaaaccgctgttccggaaaactgatggaaaccgttattccgttatggttgaacagcggtttcaccgcagcggtatatccagagttccttttacagttccaccagtttgacatcaatgctctccgatgaggtttcatcctcctgttggatgaccgtttccacattcttctgtaaagtgataattatgctgtcttggtttccaaaagtgagattgatggcttctaccaccgccgcttgcaggtctaattcctgaatcgtaggtgcatcacgccctttcgtcccatgccccacacgggttcagcaccgccagacggtgaggtgttttcctctgttattccaagcaatcctgtggtaaatctctccacatttcggacagtaaacaatgctggataaagcatacttgctactgtaaacccgtttctttcgtttctctccgctgcgcaggttcgccatccgcaccatctcctcctgcacctgtatattgaggtcgcgagggataatcagctcgtggctgttctccacataatattgcggaactatgacgttgttctgcacccgcttttcattcagaaagtccacggtataggttttctgtaacagggcgtcaccgatgtacttttcgtttctaaaaattctatgtactgttcatttatagttttcataatattattaaaaaattcttacagtcctctaaccatttaattaacaaagttcttaataaaagtgtcatattagttgaaacagtataataatagcaacttccatctggcacgacaaaagatggcagccacgctttactttacctcaatatttagaaatatattcgacattatatgatactgattttaatcgtatttcaacatattttgtcaaattatgtcgtcacaatctccgccacccttatgtcaaggccacgacaaaattttctttttccgtattgtttttttgtagaactctaagtatactatggtcacacatcataagaaaaagataagaatcaaattcttatggcacatgatttcttttatacaatgtggatggttcattgttatcccatgcatccatcaatatctaccaactttaattattctctaatcaacaaataactatcattttttactggtaagtaattaaatctgaaagttttgttattaaatccaaaacattttcagaatcactgtcctttatcaagtcatcaattaaatttaagattaacttattttttctgcttacaatataaggcaattcattgggtaaaagtggtttaatatattcatatatttcatcccatactataactttatcaatataattgcttttattaaaagaaccagtaataccagcagatctttgtaaataattatatccattataagaattaaatgttgctatattcgacttccctgctaataggcacattactctagcatcttcatatattttaccctctgggaataaagtatctgtaaataaagattttttaaatatcttattacaaactgaaaaaagtttataaaatgtttttaaaacatctttaccataatatagttccacaccagcatttgtgaaactaatttcatttttaggatatcgctgaccatcttcaaaaaccttatacatattgcagccagctatatccgcattatattttattaagtcaaaaactaaagttttatacatttctttttcaatccaatcatcgctatcaataaaacttagataagcccctttagcttttcttattccataatttcttgcacaagataagccttcattttttttattaaacaattttatgcgtttatccttttcagccagtttactacagagtactccactgccatctgttgaaccgtcattcactattatgagttcaaagttagtaaatgtttgagcgagaattgaatcaatgcatttttcaagataattttcagtattataaactggtacaattacactcaataaaatgtttgccacattatcattcctccataccaagccattcaccaggcaactcgagatcttctatattacatttattcaaacaattatatttgtccaaatattcatctcgaataccaatacaaaataagtaaacagatgtattaaagttattattaaactcgcatacagttaaaacataaccaaagttcttaaaatatcgttcaatacaataaggagtaaacctccaatagtctttatagttttcacttgtatgttgtacttgcataaatggaaccactattatcaccgcttccttggccatttcacataaatttttgaacgctttatctatatggaaaatatgttctaaagttgtgtgattataaacgacatgaaattttctttctaactctcttggaagatctttttctaaatctagcaaaatttcatccgtattgccactactaccgcgaaaaccaccgtaatttgtaatgtaatatttatctgcatttatgaaatattctttataaaatttaccattcttatctgtatccgtccaagccgatacatttacaatgtcgccatgaaaaatagtcgcatatttttctaagcattgattagaccatattctagctgccctaaatcttttatcaaccatagattcaccctttctctatcatttctttaaccctttctgctctttttttccaagtatgatttttagctgatgcaatagcattcttctggactattttaactaattgcggatttttttttatataatcaatcttagagcagaaatcttttgcatctcctggtctagctagaaatccattatattgatcttgtattatgttattaataccttcaatatctgaagctaaaattattttacctgccgccatatactcaaaaagttttaaaggtgaataaaatttgtaacgttgtttttcaaaaggaagtaagactatatccgcttcttttaaaaattctataactttcttaggtgcaacccaaggaatatgttccaaattatctggtaaatttcttaattcttgaatatctccaccaataattcgaaatttattttcaggcattaattcagccattttaaaaataataccaataccttttcctcgttgtaaacttccaatatatgaaatatttaaatttatattactaattattttttgattatctaaaaaaaaattctcccttacaccacttgttaaaacttcaattttactcatactaaagccaaacttaatacattcctctttcaattcatcagatatacacaccaatttatataatttatcattttgaataagcgattttaatattttattgaattcaactgaaaatttctcatcttcttgatctatttgatgaatttcatatatgttagaaattttatatcttgctaaaaactcattaattattatatctctcgaataaaccatatctactctgcttataagcacataaagtaaagcaaatagtttatataagaaatattttccatttaaaaaccattcaggtatcaatattaaatgtggtaatgaaactccataaaaatcttgataattaatatctttcattttctgattttttatacaaacaacctttaaatcaactaaattactcaattcttgacaaaaattcattactgcaatagaatttgcagtaaaagagggaattcttgaataagaaaaatataaaactctcagtttcaatatatccctcccctttccaatctaatatctgtgcaagccatttttaaaaatttcccttttgaagcgctaatcatctgatattaatattccattttctatagcgtagttaattctattattatttaaacctaggtcttccatctccataatggtaagtgatcgatattctttaaaaattccatttaacgagtcagcatatattgtatgctcatagtcattaaagatttcttcctttaagtagtaacaccaaggtgcaagatgaaattttgtgttaacactatggttatcattaattatcttccgggtattcttgagcttttttttactggcttcgaataacaccttttcatattcatttatacaggtttcaatgtttaaattaatttttataaactccattgcctgatttaattttactcttatatcatttttagaatttaaaatcccaattactttatttgccgtctcatcaatatctctaaaatcaacaatattaagaaattgcctaattggcatggtacgatatgtagaggcatttgtcgtgataacaggaacttgacatagtagtgcttctattgatacattagaaaaggcttcacaaaaatcaccaatacaaaggataatatcgcataatgaataatactgatccatgtagtaatgtggaatccatttatgatatataatatgcttttctaattttttttcttttatcatattatctataatatgataggtattatctgccctgtctgaaatccctttatctatatattctgggataagcatctttacatttttatttttgctaacaattttttctagtgttaatatggattccacaaatcctttatctaagtctggtctatgtggaaaaccaattaacctaaatgtcttttttgatattccaataaagtccatgaattcttttgaaagatcttttttataaaaatttttagaatcatatccattataaatgatatgtatatgatcttgtaaatagggattaattctagcaaatgaatctatcaagcaatggtacgtataatctgaatttacaattacttcttcctgctcgaagtttaacgctcctaataatgtctctgtataacaaaaatctcgaagcgatataactgtaggaattatatttttcaagtactctatattaagttgtccatcatgtaaatagaatacatcataataaggaagcctattttgtatcatttgacatgttttataaagcctatatggtgatacttcatatggagcagggaacgtacctttcaatggaatgacaggttctacttttactttgtcggataaccagaatacatctttattatctttccttcgaggacacaagatagttatttcatgtccacgctctcctagtccaattgctacatcccgtaacaccttttgcgaaccaccatgaactacatctttaaatatggggcccaaagaaaaagctataattttcatgctataaaattccttcactgttttattttaggattataaataatatttttagttcttacactgtttaatagcgtagtgttaacgtttaattcttttacttgatataaaaattgtcgacatatctttgggtaaacatgagcctccatatccgcgtttttctggataaacaaatgtatgactttttccaattcggggatctaatatccaagtctctcttaaatcatcgtattttacttccattgccctagcaatatcataaaattcattacaaaaagtggcctttaacgccaaatatgcattttccatatattttgcaagttctgcagtcatagaatctactctacatatttcaatgtctaaattatatacattttggtacaccctgattgctttagtaatcgcttccgcctttccgccaaatgttaaccactttcgtttcttaagatcggagaaaggatgatctattgtctcgccataatactgttatagtacacacgatgcgttgccctttttcttgacgatgattttgcctcttgcggaagggatttttacagcggtattgaggtacataactctcctccggtagaattcgtatgacttggtacatccatagtatattaagtgtaccttgtctatgttttgagagtagcacacttcataaaataatcaatattcttctggtatatacttattaaagacaagattaaaatggtcggctaattctttaatatcacgtctgaaaattgcacgaaacttcttcataatagaagaaaaattgctatcctcccaatcaccatgtccatttttgtaaataatgtgagaacggcgatctaaattgagattatcgaggtagctgttacatgcatttaccatatcgcgcaaaacagtttcaggtgccgctgaaaatttgtactcacctaataaattcgtgataaagtttttaatttcaattgccgacatagcacattcttctgtcacttctaaatacgaaggatttactaataagcgcctaccttcaagaaaatagaataactttttaattccgtctttctctgaatctgtaacttcccatgataaaccaccaaatggtgtactaattcctgttatctttatacccattacacattacctcctgcttttaataggagtatacagcaaaaggcgacgtttataaaggaaatcatgttatttttgtcagttccagtagtattttgttggtggcctcccacaactcggcataccgcgccttcatatcctccacgtcggcggcgtacaggctcccggtcccattgacgcgcttggcaatctggttcagattgttggtcgcgttccgcaagagacaaacaagctcccggacaccagccaaatccagattaacgatatagccgtcaaccgccatcttgcggagataggccgccatgttcgccgtccccagctgggccatcttctctgcgatcagctcccgttcccgctccgtcaccatgaaatgcagctgaacgccgcgctcccggtcagtcttggcctgtggcttattgcggcgcgtcccggcctccggctcccggccctacaacagccgggccacgacggagcggcacacctcctgatcgcggttttcgtctttggaaatgaaagcgtacaggccgggagcgtcgccgcgcggctccacggaaaggctcttgtagggcagagcggccagcagcttcatgtcggcctcgttagccaggttgcagaaaatcgggctaaccgccaccatggagcggccctctccgccgttgggattgtataggccctgaaaggcgtcaacaaggcgctgggcctcattgatgattttatcgtcggccagccgcttcacgtgggcaaccagatcggcgggccggtccgccttctcccggtcggcgtgttcctgccgaaagaggcgtttgagtattccggatgattttggttcttccgcatattttggtatttatgtatatcgccggtacatgagctttgcagacaatagttgacggctgcagcggccatacatcgtccgtttcaccattttcagtttgctattggttccttccacaaatccgttcgacaacggacttgccacagaattttcaactgcctcaatgtccttttttaatccttttgcaaaacgtgacagatcccgcatatcagaatttacatatttctcaataaacaggtacaacaacggcatactcctccggttgtatatttcccggaactcccgtatacaaacatgaagctgcctgatccgtggataatgttccatgatataaatacgatggccttcggctaattccctatccatccagagaaagcgggaaacttctgtccttgaaatgtgttcatatttttgcaatgcctttcttttctggattgtatctttactggtacttttataaacagctatatctatacgttgtcgttttatcattttgttcatatagtcgtaagctgctgtctttccacccttgtagcctttgcggcgcaggttaaggaaaacgtccttacggctcatccctgaagtaagttccctgattatataattgtaaaactgatctaagctgctcctgtgatccctgcggcacagggattcataatcaccattaaggaacttggtgactgtattccggctgcaatgtattattcttgcaatttctcttttgctgtatccggcatccgcatattggtggatactgttgtataattgtacacttttgaggttatattctactgaattatccacagcatctagcattttttttactttcccgtataacggcagcatcgtctgtcatgggggatgggatatcgcctattgggatctttatgtccaccggcaccgttgcgtttactatgtttttcactgcttccagcaggttctgatgcaggtggaaacggtcagctgcctgcatacagtccggcagtatctactccacagcttacgcatatgctgatgcccggtctctggtcactgtggttacatgcctgttattttccagccatttcttcagtgcggccccatcccgtccctccagcacagcaaccggcatatgggtgagttcatccacaataacaatgtaaacgccaaatagcaagtaccttgatatttttaggcggctgctttgcagccaccagtatttaagctttgcggatctctgccggaagtttttctgaccagggcagaagaggttctaaaaaggaacaatccctgtcatccatgtgtttcgggatttcttccaagagatactgcacataatcaaaaggtttcagattgttagcttttgcagtctccacaatgctgtaaatgattgcggaagtcttggctccattgattgtatcaatcatctgccaattcttcttcccaatacaaaaaccccggattgccctttcggatgcttattctcatatgtggataagcatccttatacgcaggatatttttatcctcatcttttgcccgatatagcataaatcaaggcattgttcaataaaagatgtggataacaatccgccttatccctgataatggaatcatcaaatttatggaggtgattccgcatggaacaatacgacaaaaatgtaactgtcatccttgaatttcttgtcgcagagaactttagtgcatctgtgataagtctgcatcggctctgctataaggcattgcgaaaacatctgactgaagaaaaaatactttattcttcagataccgcatatcgatggattgatgacaacaaagcttgctggacctatcggcagcatactggctggaagcattgcgttgaccagctggaagatgtatatgccaatgggcttatattacctgatcacttgggtgcaaggggctcagcctactgcctgctgtcagaaacattgaaagctgaactggatgattttctggacaacggattgatcactcctgatgatgaccgttaccgcatcacctgcgcaaggtttttattgtacctgcaaaacaagggactccaaagcattagccagctatattattctaggctgctgaattttcataaggatgattaccacaaatcttccatctccaaagatgtttatgaagatttgatacgggtgtttttaaggtatagttctgatcgagggaaatgctctctggggttttcgcttgcccttaacaagctgctaatccatcagatagtggagattcctgatgccggattgtcgggaacaaccccaactgtatttccggttatttcatggtcgattatagagagatttcttcaggaaatggctaatacccgttataaggacaccgtcctcaaaagtacaaaacacatcctgacactttactatattttcctagatatgcatactttcagcaggaccgaagaaaacctgtggttatggtttgaacatgtaaagcctttcttaggtgctggatggaaacagcacaggcgcagtttatgtcagttcctacactatctgaaaactggcattattactaccagctatacgggtgacccgtcttatgttcccccggttgacagactccctgcctgggcgagtgacagcattcattcctatcttgccctgcttgaacgtgagggatggaaaaaatcaaccataaccatgcaccgttcctgttgtatccgattctgtcaatatctgcaaaaagacgggataaataattttggcgaaatcactacggacactttgcagaattttaaccgtaaggatatacatacgacgcctgagggcaaagcagcttataactgcagaataagatgtttccttatatatctttatgaacaaggcatgatctgcaatccatatctgcataaagcccttccgactatgtcagctccacacacagtcattgtgcagacattgtctacagaggatatggcttatatatggtctgtcgatattgatacgctttcacctgtggggctgcgggattatgccattgtatgtgtcggactcaccatgggtttcagagccattgacatcgtctctcttcgttttgaaaatatcgactggaagagacggagcatatgtctgacacaggagaaaacaggcaaaaacatcgcactgccgatgcctgtgaaaaccggcaacattttgttcagatatcttcgtgatggcagaccggaaagtgccgacgcacatgtatttatcaagcacaaaacacctgtcaaagggcttcatcgctgcgtatgtgcaaaagccttaaaacggtttcggcctcaggcggatacttacagggatggtttccatgtgcttcggaaaacatttgcaacaaacctgttaagaggcaatacgaaagctgagcttattgctgactcgctcggacataatacggacagtaccgtgcataaatatctttcacttgatgaggaacggatgcggcagtgccctatatcactggatgctgttggcatctctttacaaggaggtgtcttccatgcataaggatttccattattccagtatatttgccgatttaatctggacctatgtcaatacattggacacaaaaagttgaacttttttatacagcttcgataacttcgtcctctatttgttgaggagttttgtatccaagtgcactgtgaatcctctggcggttataccaggattctatatactcaaagatcgccttgcggcattcttcaaactcttggtaggtgtgaagatatatttcttcttttttcattacagaatggaaggattcaatgcatgcattatcatacggatttccttttctgctatatgaatgcacaaagccattatctttcatatatttctcaaatatgtcactggtatattggctgcctaaatcactatgaaggataattccatttgtatccggtacgttaagacaagcattcttaacagcatccagagctaattcggcagtcatatttttaccataagcataacctatgatcttgcggtcatagagatccataacggaagccagataggtccatccttcctttaatacatggatataagtaatatcagtaacccacttttgattaatggtctctgccttgaaattgcggtttaaaacattttccttattgtcaggaaccttaccctggttaactttatgattgtatttttttaccacaacagagtacaatccctgacgctgcatgtgtcgctgtactctcttgacactgcatggaataccgttctcattaagctttctatgtatctttactgcaccataccgttttttgttttcttcaaagcattgctttacttctgccgaaaattttaagtattcctgtttcttatttgaaggtacacgaactagagcctcataataggtgcttcttgcaaattttaaggctttacacagttgtttaactgaatatttatcgaggttagtattgatgaaggacacgtattccgttatcgatcctttgcgaatatggcggtagctttttttaatatttcattctcaatctcaagttcccgcattttcttttgaagtgctttataatccttcatagagatggtttctgtatccgatacctgtattgggcttaagtttcttacccagcctaaaatagttgattttgccacgccatattcgcttgataactgtgggaaagagtaatttcccgtattatacaactccacaatctgttgcttgaattcctgtgtgtactttttttgattctttgccatgttgaacagctcctttacagtatgatattgattataagcttttcaacttttcgtgtccatacttatatactagcaccaaaagcttgagtccatgtacatggtatgctccaaactgtttgaaaaagcagaaattcagaccgtcaacaggagctgctgcggagtacatgtctgccggtatacgctaacgcacaaacttcttttaaacaagataccgcatcaggtaatcacagatgcccttggtcatgtttccaaagaatcagacaagccatatctgtcaatggaagaacagatgttaaaggaatgtccgcttgatttctccctggtcgggcagaaatactgggaagaaggtgatcgctttgactgatcctgttttccgcagcaaacttagtgctgatttcgaggccttcatctctcagaaaaaagcagccggatacccttataatacttcaacaaaagtattgggttatcttgatgctatgattgcagatgattatcaggactgcggtatcctgtccaaaaaaatctgtgatgcatggatcaggaaatgttccgtacttcatcagaacaccttgctcagacgggtgactcctgtccgccagttcgccaaataccttgtaggaactggaaaatctgcgtatatcattcccagtgggataccaagaaaacagatacggtatgatgctcacatttttacagaagcagagttaaaggccttctttacttccattgatacctgtaaaaaatcacctttttcacctctacgctgctatgtgataccggttatcttccggcttatttatacctgcggccttagagcctcggaagccaggcttttgcgcaccgatgatatcaatctttctacaggaaaaatttttatcagggaatccaaaggatgggaagcccgtattgttttcgttagcgatgacatgctggatctgctatgtcgatatgaccatatcatcagagacacataccctgacaggacagcattctttccgaatcaatccggagattattacagtaaatctactctggatgaatggttccatgaattctgggatcaacttccggaagcagccgtaaccaaaggcaatccgccaagagtccatgattttcgccattcttactgtgtttacaggctgaaccaatgggttggagaacatgcggatctgaatgctttatatccttatctgagtgaatttatgggacactcaaactttgcagacacggattattatcttacactggctgagccattttactctgagtttgaatctcgtatgtactccgtaaatgcttctatactaccggaggtgccgcatgaagattaaaaaatctgagctttacttttatgaacttctccgggacttcctgcataaatatctgaccatacagcggaagtttacggaggcaacggttaaaaactatacagattcgctggatcaatatcgccaatacctgcgctcacaaaaagagatcccgtttgataaagttgggtttcactgctttacaaaagaaatggtttatgacttctgcatttggttaagagatagcgagtcaaaatcaatcaatacaataaatctcaggctttcagcaatcaagtcatttctacgttactgcagtgaagaagatgccacgttatcagaactctatctgaaagtgaaatcaatccgccgcttcaagggaaaaacaaatccgaagcttgaatacctgagacctgaacagctggaatctatcttctcctggccggatacagcaacacggaatggacgccgtaatcaatatttcatgatccatgcttatgaaaccgggggcaggattgaagagctggtcaacatgaggctggaagatatcatccgcaacggagcaagtgtgcagatccgactccatggaaaagggaacaagacccggtataatcctcttccaacagaagtcctgccgcatctggatgcttaccttaatgaatttcatccaggcagaaataatcgggactatcttttttatacaatccataatggccagcatacgaaaatggctcccagaacagtgaattcttttcttgcgtcctatgcaaaagaactgcacaaagttgatccatcttttccggaggggctccactgtcatgttttccggcatagcataggaatggcaatgttcaaagctgggatacctctgccttatatcaaggactttctggggcattcatcgatcgattcaacatcgatctacgcccatgcagacaatgagacaatggccgccgctcttcgctctgtagatcaggaagcactgcctgtaaaggactctgacggcaatgttgtatcttatccaaagaagaaatggaaaggaaaagaagaatatctgctccatttctgcggactggattaaataattatcggcgatcaaagacagcagttcagcctgaaaatacgattatagcgtttattcaggctgagattgctgataacattttttcgccgataatccttaggagcccggacacgggcggggatgatggcagtgccatagtgttcagccatttcctgataaacagtattgatccgctggtctttccagcctttgttatggtcaactgctgtacggcagttatcaggcaccaggatcttggcaaccccgccgaagtattcatacatatgtacatgggctgcaatccaggaaggctgcttttcgtcgatgaacgcttcaacataaggatactggctgtaagtcataacaccgacgaaaagataagcattgatgatctctccggtatcaggatcagtgatgtgggcaggatcccctgcccaatcaacctctacctgttctgcaggtttccggttgatgtgcatggttgcccgccgtttcagttcgtcttgttggatataataacaaaactgtgagtacatcagcggttcgtcaccggcaaggcggcattcttcaagatattctgtccacagaagttttttgttaactccattgcggagcagttccttgcggatgtgggcataatccggcatccgtttgttggtatgaacctgcttaccgtccggctttggaaacagcaactgctcaattacagggtcagtctgatctgcatcaagtggccacgagatattttgctcccgggcagcctttagaaccttattgactgttttctttgaaacaccgcagctgagcgcgatattggtttggctgagattcagactggcaagtctgataatctctcggtacttagtcataaaagatgacctccttcaaatgtatttacgccatagacgtatgaatacattataaaggattcgcagtagcggtttccatttccggaatagcggtttccaccagaacggaataacggtttccattaatccggaacagcggtttccaatctccggaatgggggtgtaaaatcatccggaatactcaccagccatttcttcagtgcggccccatcccgtccctccagcacggcaaccggcatataggtgagttcatccataataacagtcccgtaagcatggcgttttttaaaagcaaaagtatctttttaacaacatacgtattaccgtatccccgctgatttttatattcatggccttcataatacgggcacttgcctcacagctggtttcaagggaaagtattgtaaccaaatctaccagactttccgtcatccggctataataattcaggaagccatggaatgtttcagaaaaggcgcctttcctgcagcctttattttggcatagaaaatcatgtacccttatatccaggaggacacgtttccccagaataggaaggtcttgtacggtacgatgatgtgtggcatgtagtttatggagcgtttgaccacattcaggacaacaaaaagattttgtccttgataccatgtgagctttaattcgatatcattttcttcaacagaaatgatctcaagttcctttggataaactgttgtagattgagggaaagttttgcaggcataggtatgggatcctttcttttttaattactacaatattatgatgttggggtcgaataaaatattttcgaccgtataaattctatagtaccttgaaaatttcacacattatatatttttagtgattgctgacggcaataatctttggaagttaagacattcccttgctttttattagcaaattgcccgtaataaaggatttggggcataatgacctagaccattcttataggtgaatagtttcctgacatttaatgctgctattttatacccaaagaatagtctgcttcggatgcatcctctaaccggcatccggtctgtatgatggattctccttagtatagaggggattgtttcgactccgtttcgaagatgtgccagaagatgaaattcttctgttcccatcattcgtttggttcttgcccgaaattgcgctgttgctgatattgtgagggaacatacttttttgtggactttcacccggcattgttctttatgaggacagttcatgcattgctctcttggaaatgagacataaatatgtcctccgccacccttactgtggcagctgctctttggtgtatgaccagcaggacattttaaaacacgggtgccttcttcattcagtaggaagtccgcatatatttcaggaacttctattcctgttatggctgttgtaacaagttttacgttttgtttctgtgccagacggctgttttcttctccgaagtatgcaccatctgtgacaaccaccgatccttcctctgaacggccatttctctcaaggctgtctttcaaaaactgactgtcagaatagttgttctgttcaagctgataatccagtacaacagaaccattctcacctactgcttcatcaacatctgccacatatcctctatattgctttcctgctttttcgcggaatgtggcatccggatcggagggattctgcagaacggaagaatccattgtgccatcctcttttgtcttgaggcggcggatggtatcttccacaaccgtctgctctgaaagacatcttataagaagttgatactctgtgacatcagcagactcctgaccacatgatataagtagtttatcggcatcttccaagatcacttttatccggtctgctgtttcattgctgttgctgtaataaaatgtccggttgaagtcatcgggatcataatagtgctccaatcctgccaaaagagaatcctggttattcctgtgcagatacatgacgaacttagatacacaggtgtatagcaattctgcacggcttagatttttaatatttgcttcaatcatcagggagtccatacggcggattttagggcttatattcataatacgtgcaatctgcttacttaatccagtaatgcagtcatggagcagatcaatgccataagctgcttcgtaattataacagcgttcacgaaaacggctcagtgttttatcactgagtggctgttcttcataactggttgtgtgaagtgcgtactggtaacgggtatccagcatcagactttcaacaatttcgtcatccgatacctggaacatttcttttatgattaatgcaccgacacagatatttaccggagtattggcgcggcactgcgttctggatgaataaagcacacgaaaaggttcttcgtcaattgccgggaagatatcttctgcaaaaacttttgcccatgatttttcaagagcctttaattctcgggatgtaagattacttatgctgtcggttagcgaatactgttgtgaatcatttgttttaaaagccattatgctgtcccctttcctgatattccaattataccaaagacagagggcaacagctaggtttgtgtgaaattttcaaggtactatatgaggtctatttgaccccaacatcttattatcagatgtaataaaaattgaattagaattacttactaagtttttcctatattctgtaatcaaaaaatagagatactcctcagctaattttgctggattgttatagattgcagaatcaatgttcttaaaaaagtattctattttatttttcacatatgtaattttttttctaaatggtacttgtacattcttccgcaaacaattcttgaatttagtcataatttactgatatggaaactactatactataaaacaatttacatttatctccttagtaaaaactactaccaatgacatatcagaatatgcaagtctcccccaagttaggctcttcagcttatttgaatagaatccgcatatggatatgtaataagtatttcatctgccatactatcaatatctaattttcctgcaatgccattgacagctttatttgatccatctacagaaagggaatatggatatactataaaatttgcagttacaaaagatgtagaaacttgctcttctttacccttattattaataccaaatgtaaagcgaaatttcatcctacatgatttatctggaaaaaagcaaacaggaatcactatagttttcttagaatcaatgtattcatcaacatcatcagtccattcaaaattgctcttagatgtatctattctcaccccatatgcaactctacttggtgctccgtaaccacctacagaaaggctgccattatataccgaaaaattaacattataatcactaattgtaacattcttactttcgtcacatattgcttctggaataagggaaaaaattccatctgcgtaaccttctatcaaatcagaatatgtaaccaaagatttcacttcactctcttctgacttaagaattggaatttctacctctatattctccttacctaacgtctttactaaatcaccgtctttactagtaaatgtaattataaggttactagcatctccccagccattattaaaaactgatatattaataccatcatctgcttgatgcgaatatatttttagcactggagaataatccacttctatctccttcgtttctaatgtaatttcattcaactgaatttcatgatcataattatttgatattgatatttgtgttgcacatctttcttcaaatttataatccttcgtatcgtctatataatctttaaacaacgaataaacctctttaaatctatcatttccaatagataaatattgaacactcacattgtttttaattgttgtttgtggctttttttctttttctgtccaatcttttatttgaaggcttgtataaatcaaagcagaaattgcactaaagcttccgataatagtaatgataaccattatatttttaattttctttttccttttattctgtttaataattttatctatatcgctcatagtactttctcccagttaacctatctttacctaaagatgataaatttcacattattaaatcgtttctttataatattgttctaaaagaaaaaatatctacagtaatttttcctctgtactttttaattatataaacagtcttgtttctaagttctaagcgcctcttagtctttccttctttaaactggttcaccaaatgtatcaggataattcggattaaaaacctcattacaaatcatcacggttataaggttctcagaattactcaagttaataatattatgggtccaacctggaatcatgtgaatagcttcaattttatcaccactgacctcaaactcaacagtctcacctgtattaatattacgctcctgaatcaaaccatgaccggcaaccacaataaacaattcccatttactgttatgccaatgctgccccttgataacgcccggtctgctaatattaatggacacctgaccacaatcttctgtatgcaccaattcagtaaaactaccacggttatccacattcatcttcatcgcatacttgaacttatccgtcggcagataggtcaggtacaaactatagagctttttagcaaaagacccctccggcattttaggcatcatcaatgtaatcggctgctgcttaaattgttccaacagacttacaatttcaccaagggttaccttatgtgttactggaacacagcagtagcgtccatcttcttttaatacagcatctataccatcaaattcacaatgtatttctttaccttccagtaggtcaaacataccttcaacaagatcatcaatataaagaagttccaattcagtagaataatcattgacggtaaatggttcgtcattagccaccgcccaacaaaaagtcgaaacggcactattgtattttggacgggaatgtcccatcaggttgggaaaacgataaactgccaccttcgcaccagtttcttctgcataacagaagaacagttcctctcctgctttcttggatcgaccatactctgagtttccaaaacgacctgcaagggtagcctgaatggaagaactcaacataatcggagctttattttcatactttttaagtaggttcaagagatccgatgcaaagccaaaattccccttcataaaatcttccaaattttcaggtcggtttacaccggcaaggttgaaaacaaagtccgctttctggcaaaaagtctccagttcctccatagtagaatcaatgtcataacagaatatctcattaatttttagatttggacgagttctgtttttgttgtcccttaaatttttcaggttgtttacgagagcagttccaaccatgcccttagcacctgtaactaatatattcatatgttttagcctttctctttttcttggcatatttttcaaacatcttttctccataccattttatttacaacattgacataactctggataatccttaccactttcatactcacacactcattcgtataatcaacacaaggatgaccgagaacgcctttttgcttcatggcaattgccatttcagttgcctggcacagttccttagtagaaatccctgcgagaataaaatcacctgcttccaatgcttccgggcgttctgtcgatgtacgaatgcacaccgctgctatcggatgtccaatggaaaggtagaaagagctctcttccggaagggttccagaatcagaaactattgccaacgcattcatctgcaggcagttataatcattaaaacctaaaggctcatttattctcacacgtgaatcaagcttaaagccagatgcttccaacttcttacgggaacgaggatgacaggaatacaaaattggcatgtcatacttctgcgctaatgcattgattgcgttgaacagagacataaagttcttgtcagtatcaatattctcttctcgatgtgccgaaagaagaatatattgatcctttttcaaccctaagcgttggagtacattggaagctttaatcttttctaaatttccatgaagaacctcagccatcggagaccccgttacaaaggttctttccttcggcataccaaattcatgcagatatttgcgagcggcttcagaataagggaggtttacatcagaaatgacatcaacgattcggcggtttgtttcctcaggaagacactcatccttacaacgattaccagcttccatatggaagattggaatatgaagtctctttgctgaaatagcagaaagacaagaattcgtatcaccaagaaccaacaacgcatcgggtttaatctccgccaacagctcataagaacgtgcaatcacatttccacaagtctggcctagattttcacctaccacattaagatatacatccggaccgccaagatcaaaatcgctccagaaaatatcattcaaatttttatcgtaattctgaccagtatgtgcaacacagcagtcaaaataatcacgacattgtttgatggtcgccgcaagccggataatctctggacgggtacctactataatacaaagtttgatggcttcattatttttccagatgaatttgtatgacattttatttatcctttctatatctatgagggactaagttattgattgtatattccggttttctaccttccggaatgatggccctgaagtagttcttcccaattatccgttattaacctatatatgaagaaatcaattttgcagattagggagttttttccacatcggccatatataattctctttatcattttaagtttactattgttgccttccacaaactaatttgataataggctggcaattgaattatatatggcatcaaaatctgttttcaagtcagagataactcatacgtattcatttaattaggaagccttatatttggggttatagaaattctgtaatttctatgaggtgtatgtacatatatagcgccttactctattgtgatgactccttcatattcaggtaacgcaaacattgtaaatgccccaccattcctatacaatttcttgcgcaataacttttcgcaggaatacctgtatatgtcatattttccttagtggcatcttttgtgaaaagactactgccgcttatcacagtatccttagcaatagttgttcccgcttaccagtctcgattttcatgaaacatttcgcctcctcctagggccattagtgtgcgtacaaaagcgcgtcagccagcctatcattgcagccgttcgatttgtgcaaatttaactaccacactacgctcgtttgataccccaggagattgaatcagcaatgaggtatactggaatccatacaaattcactttcggaggtacaaagaatgtacaacgctttcgttagtaatgacctgtactacaatagaatcaaacatattactgcgaccagtgtctctggaaccaagaatttctatagtaagttttagaatatttcgctgacgggaaccacgcaaaccaatggttgattccaaccaatcagggctgatatcccaatgtttccaaatggaaccattagctgttgcctatgaaaccatatactcagcacataggtttattatgttctttatcaatttactgaatatctatcattaaagaatcttggacaattattgtaccagtcaagtagggcaaacagagtaccgaagattgtagatgccttataataacggcgtggataatttccttagatcccttacttctgtttctgtaagttttacaaacattcatttagaataagccgtgtgcatttctcgtactgtttcatggtttccttaaacttttattctcctcggcagctgctagttgtaagaggcgttgtagtagtggaatatattttgttgggtagtaatacttgtagacttctatatcaagagcatggctcgaataggatttcccgaaactggttgttttcgtaataatgatattgtacttctcccatatgtctccacaagtagacagccgctcaatgaatgttctgtctagttttctacttgatgtataattaacatcatgaaatttgcctatagctgaaattcttcactaccaccctatctatattatccttgtgctcaacccaaagtatgcatcccataacctgacaggaagaaaagcatagcaaccgacaaataaccaagcccttgaaagatgattgttatgtatatctctctaaacaccccaagtattgatacaagtgatgtgtcagtataaaaagagcaaatattccttttatacagttcatattagggaaactcaaataattacaacagtcccccctaatttttttacttatacaaaatttttaccttcaatgaatacatccagttttcgatataataccaatttaactttcatgcaccttagtatacgtttttcttgtgtgaccaaataaaaatggcaaatacttatttaacacaaaggtacatggcaaacaaataattagtaatgcaatgaaagatacccaatatactggatataaatcgtatgaatatcccaacttaaccacgaccaagcgcataacctttagcacaggaggatgaactatatataatattagtgaattccgagaacagaattctaggaattctgacttgcaaatcagttggctataatgcgtcacgactgcgcatcccaaaatggaggttacaaaaaaaataaataaatttccataagaatttatatacatcagaattggtgaattcagtgtagaaaatacacagagacatccaaataatacaattccccctccccgcattacaaagttattttttttaatcttatctagcaatggtttcattatcactcccatatcaaagaatattgatgccattagagtctgtaataataactgtgggacatcaattctgttataaattacagctacaaggataaactctacaatcatccacattgcaaccgcacctttaaatttgagtcgatttttgcaccattgcattattttcacaataaataatgtccataaaaaccatactgaaaactgtgcaacaacatcaatttcacttaattgtatctgtcgtaagagcaaaacatctatcataatggttaccacaatattaataacgccaaatgtaaatgcaggaaccactaatgaatatatattcttcttaatgcactttaggaaactaatatctttttcagaagtcaccattcccgaaataataaagaataagggcatgtgaaacgataatatcaaggtatttaagctattcgctgcagttgaaatagagtgtcccaacatgacaaggagaattgctattcctcgcatattatcaatatatgatattctctcccttccctccgatttaagttttccgtttacaatctcattgttcatagcactcctcactttcctatataacaattaggcgtttgcgaaacgccacagcccgcataaatttgggcttttttctttgataaaacagaataactcctcacaggtttgtggtaaaattgagatgtccaataacaattaaccaaatccacctgaaaggagttgtacctatatgataccatataatcagctttctttggcagatattttttcagattgccaggaaatttttgaatctgacaaaccccagttcctgactttactccacaaccacattgacctggatgaaattgtccctgcttccttccggaaacatttctatgcatcaacgggcatatcccgcaaataccctttatacgcctttctttgggctcttattatccaaaaaatccataccaacagattctcttttgcttatttttctgcattattccaggcaccttcgggaatctgcgggtttgataaagtccccgatgcctccaagatcacacgcttcaaacaggattttctgaatgatctcaatgacttctttctttgtcttgttgagcctacagaactaatctgccagcagggcctccatgactatctttgattcttccggcattgaagcctgggtcacagaaaacaatccgaaatacgccaaccgcatcatcaaacaattaaaagcctacgcaaaatctatgaactttgatgaccgctatgacccttacaaagcggcttattgctccatgccctcccatgcttgtgcgaaccctgagatcaagcagctctacattgacgggcatttctgctatgcctataaattcggcatcgtcacaaacggcctgggcattatccgccacatagacttttacaataaggatttctttgaccggcatccgcaggtcattgtaaataaaagatccgattccccagatgaggacaaatccgtacacgacgcaagactgctcatccctactttgcaggattttttcctggcacatccgctgatcaacccgaaaacctttttgggtgattccgcttttgattccgtaaaactctataaggaacttctttctggtaatacctttggcacgaatcctgacggcagcgggatccattttgaaaaagcgtacatccccttgaatgcaagggcacatctggaacatgtggattataccatcaatgccgatggcattccctgctgcccagccagcccggaacttccaatgaaatatgaaggaacagccaaactcaagagcggtgtgacacgatataaatttgtgtgtccgaaaatacggtggatccatgtcactgccacaaacaagtatcaccgccaatgtctttgcgaaaatccctgtacctcttccccctgcggaagaatggtttatatttatcacgaaaaggatctaagggcttatccgggtactttaagaggcacttcggattgggatgacacttataagatccggacaaccgttgaacgctccatcaatcatgtaaaggattccttctgtcttgcaggcagaaaaacacaaaacgaaaaaacgctccatgcggacctgctgcttgccgggatcacccaactccttggagtaatccttgcagacaggatccatcagcatcaatatatccgtagcctaaaaccgctggccgcttaaacctcaacacatataggacttatcacttcatacaggggactatccacggttccttgctttcatgtgccaatttcccacctcccagccagaatcgctgacacatccgctaatttatctgaggaatcatgctcaggcaggattcctgccttatctggtctcaagattgcgaacttgtttcgcaattacctactatataataaatcactctttaattctttgctaactcttcctgaatataagatagcgaagcaatcttctctttggtttgttcaacatttaaaagctgtgtattattagagttaaattcagtcaatatattacgttctgtatcccccttactgaaatacttatcgtagttcaatccacgcttatcacagggcacacgataaaaatcacccatatcaatggcatgggcacattcttcgttggtaagtagagtctcatacattttctcaccatgtcgaattccgataaccttgatatcctctttctttccgccgaacagctcacataccgcctctgcctgtgtgtgaatggtacaagccggagccttctgtacgagaatatcgccagcttgcccgtattcaaatgcgaacaaaacaagatcaacagcttcgtcaagagacatgatgaaacgagtcatagtcggttcagtaagtgtaattggattaccgtttcgaatctggtcgatccacaacggtataacagaaccacgggagcacattacattgccataacgagtacaacagattttagttgtattcgttgttcttgctttcgaaacaataaccttttccatcattgccttacttgtacccatagcattgacaggataagcagctttgtcggttgacagacagacaacatttttaacgcctgcttcgattgccgccgttaacacattctctgtacctagaacattggtcttaacagcttcaattgggaagaattcgcatgacggtacctgcttaagggccgcagcatgaaatatgtaatcaacaccatgcatagcgttcctgatagatgcgatgtcacgaacatcgccgatatagaaactaattttgtctgcaacttccggcatcttcgcctgaaattcatggcgcatatcgtcttgcttcttctcgtcacgggagaagatgcggatttctccaatatcagtcttaacgaaccgattgagtacggcgttgccgaagcttccagtaccacctgtgatcagtagtgttttgtttgtaaaaagatttatagacatcttgtgtctcctccttataaattacgactatttcttcataaaataattacctcttaagcacaaccaaaaatccttaccatatatctctatctcccctaacttccaacataaatttcgtcctaatatatattacaacgataacatccaatcaatatactctgtatgccgtcaaactcacaagactcctccataaacttcatcacctaatttaattcaaatatccttctcaagtccaatattctagaataatattgtgctccggcttgtgttaaatgtctacaatcctggcttatgtatttaccatcatccgtgaatacgagtacagttccatcatcttgaagtattggtgcaataaaatcaatatacttttcaccgaaaattgtcttctcttgctcatacatatcagctacatccatataagaagctgtttgtaagaaataattttcggaatatctccgattataaaaattaccatttgtatttccgtatctctttgtaccgataccaaatactttcgtattagcagatatattatcatacaaatagtccggtaaagtaccctttacgactgcactggcaagaataaataaataatccgcgtcttgtattcgttcaatatcttcctcacgcaattgctgattatgagtgtatacaatgtcaagttgtgatgaaatatccgattctaatagcacattcacccagtctcgcccgaaactatctcctataacaaataccctaatcctaccatcgtcagcaaataatacatctaaatcataaactctatcgcagtattcggcatgcattcctctgtgaatgtcactggtatatatatctaattctggaacatctctcacaaccccagaaactgaatagagatataaagcttccgatatcgaaataataccacaaaggcagcaacaaacggatgttataataagggtctttgtatttttgcaattaatttttctctcaattccgtaatatgtactaactgaaataaacattgtaactataagaattaaaataatttcataccaaactggatctgagttaacaatatatcgataaaaggccaaaataacctgatgccaaatatatatactgtaactaatcataccaagcttcgatatcaccaaatatattattttacaatcaaacttttcactgcaacctctttgtagggaataaactattgctaagcacgacaaaatcactactaaaaggagtctaatagttgtaggaagaaactcaacattcagcaaaaataataccgctaacattggtacactaatccaaaaatacctataaattttcttaattttttcattttttaacatcaaattggaagctcctaatgctaaaagacatccaatagacagttcaaaaaatctgtattgtaaaaaatagaatttatttgcacttccaccaggcataagatataaaaacaacgatagaaaagtcaaaaaagctatcaccatcgctaaacttttcttaaatttttttgccatcttacgcaccaccataacaataagaaaatagaccatataaaactgtacaattactccaagataccacatatgcattaaaggcttatattcctgcaccacatcccagtaatttgctgttgttatttttgctaagatattataggcaaatatatttgaagctacaacagattgtcctaaattttccaaatcgtctggtaacattgtgaagtaaccgataaccacggatactacacctgctagcaaaacaagcggccataaccgaacaattcgtttaaccagaaaagttatgcaggaaaaattatttttttcataggtgcggagtatgctgtttgttattaggtatccatttatcaccaaaaataaatcaacacccaaatatccatacgttagaagacctatgtggtaaaaaacaaccacaataattgcgattccttttaggaaatcgatccagttatcacgccccccccccatatagattttattcatcttttattcactcactttctttttctcatttaaaacattttagccaaagcatccttaaactctcgattgagttgctgtatgcgttcacgactattatattcagactgaatgttaattcctattatagtctctgctatttccttgggtgtttgattctcataatagtataacaagtcacctacaggagatttggcgattacctcagttcttatgcttacgactcttaacccatttccaagatatgaaagaattttgctaggaaaagaagtatcattaaatgcactttcagggttctgcgtacatagaccgatatcacatgtttgcaaaaaatctacataatcatcaccggccaaaactccatcgtaactaatctctgccatacttttggtcttaatatccctcacaagattttttattgaattaacctcacactctgtcccaaagcctaatatatgtacatggtaacattgtggtaaaaactcggctgcagaagcagcagcaacagcggccccttttctctcgtccagtgttcctgcgtagacaacatgaatcatgctcggcccttttacaatatgcttctctggctgtgtcgtgtaacacccataaagagaaatatatttcttattgcttgtattaaccaaactattaagtttttccgtggcaaatatatatgaatcagcacacttgaagaactctaactctttccttttaagtaccgcatcattcactacatctgcatatatttcttccacctgtagaactagtttaaaccgttttatacgtttcaatagcataacaagtctcatataaaacaatgagtgataaacaacaagagtatcatttggagataatcgatgtaacaggtacataaatatattccaattcataaattttctatctaatgcattaagaattcgcccccttttacccaaagacataaatgtctttaataacaaattactataaatatactcttttttcgcaatactgacataagaattattggttgcggctgctgatacaatctctaccccattcggatgtatctccattaaagtattaacaacatactctataactggtaccgcagacaatggatatcttctgttatccttcttatttgctggattatcataataacacaaatacttaatactcattgtctagctccttttttatcatcacccaatccaaatctaatttgactattctatgatatcctgaatgtgcagaatcaataattacactatcttcttgaaaattaaatcttggatgtaagtcacttctataatcacacgaattaaatggtgaatagaatcttccaagttcaagcaccttttttgttttaaggcagtacaaatacaaatgcctaaacgaatacatatcttcgtatgtatcagtcaacatatatttgccgtcctttgtaaaactggggtgaccatcaataggaaataaagtcttatctatctctccctgcatcttccctgatatgcaatcataaaactgatatccgcaggatggaacgatttctttacgaactatcggtgtcaagaatcgacctattgtctttttataaactacacgcaatgcacgtccaaaatttccggattgttgagtaattttcctataggtttccaatgctttctttttttcctgtgtaaacactacaaatcgttcatcatccaaccaccccatatgtgaccagctgttgtttcgccaaccatcaataatacgcaggtcagatccatcaatcttagccgtaaaaattcgcgtcgtaaagcctgaaacatactgaaaacgatgataaaatgcaaatcgcgtcccccctggattgatcataatatgttcaacccaatgtttggcatttgcaaacgattcatcggaatccacagagataactttttcgatagggactatacattttctttcctttgttttgaaatcaaaccggaatacgccatcaccttcgacaatcggtccgtcgtagtattggttacggatagattcatagtgatacgctctgcaccagtagcttcttttaaactctaatgagatagaaatagcagcatcccttgtaataccataaatgggaaaatgatatatttcatcacgcccctgctctatgtcataaacctttgaaataaaatcattccctgctgtcgcattgtatatgaatgaatcgctttttcctagccattgcaacatagagccctgctgccagttaaacgcattcgttctatcaacaggatgccactctcctgtttctaaatcaaaccaaccaacctccgcagtatcatcactacgaatacttcgtccatcgaagtcaactctttgtgacaacaattttgttcggttaaaattgataggagaatagttatagtatccaaaccagtagcttgtcagttccggagacataaacgccaactctacataaggacttaatatgaattcatttttcaatctttaatacctctttcttttttaaccctaaaaagacgattagcaccccaacacatcggcataccgttccggagagacttccaataacaatgctgtaaatgccattgcccagcttaaagcacacaaatatgacaatcagctgtacaaccaaatcaatcagcgaaaggacattcatggtagcgggcttgttcatagcgttcagcacctgccaaggcatatctaaaagacaactcggtaaaatcacacatatggaagctgcaataattccgctggcctcagtataattcggcaaaatccgcggaattaataccattgctccaaaaacaccacatggaataattatcagtatcaaaagacaactcacaaggaagggctttttgcagatactcaagcatcttctataatcggaagatcgtccatactcttgagtaactttgggcgcatacacagccgataccgactgaggtacctgtcgcacaaggccgtatatcgtccaagcaaaagaccaatatcccagtccagtttgtccgagaaaggccaaaaccatagtagaacgaactgcctcgatacctgttgtaattgcataactagaagtgaatctcggaagtccgtttcgaataatctccttaaaattcttccatacaaatttaggatgatccttgattggtctttgaatatacataagaatcgtggaaggcaacaggtatatgttctttagaaacaagccaatatacggtacaatgaaatacactggtataatcaggagtgtgtaacagggcgcaattagctgtactctggacattctcacgaaatcttgccctgaacgataggttgctttgatgaagccgccgtatactgttgtaaacattgcagacgcctgtgccaaccaccccaacgcagccttccaatttcccaccccaaaagagtacacggcaagcccaagaaagacaatggagataggcacacttacgataaaaatccacgcttcagaggtagttacataagctttagctctctgccgctcacctttgcctatatacaggggatataggcgctccacaccctgatatgtaccaagatgtaaaaagaataggtaattggtaataatcccaaactgtctgaagtaccccaactcctcagcagtaacaaatttggcttgaataaccgaagccagtgctaccactacagccacaattagattgctattcatataggaaaatacagctgttacattttctgatttcattggttttattatctttttgaacattagaataccctttacccccaaaccccatttgccatatctaaatgttcaggattcaacactcctgtttgtatatcacaaataaccttgtagaaacactcactcaaatgttgaatatcaaagcactctacggctcttttcctcatacaaaccgcatttgcatgcgtaaactctggatgcttaatcacatattgcaatgtctctctcaatttttcaacatccccttcaggaagaataataccttcctcaccaatctggtaaggcaccgaacccgatgtattcccaatcacacataactctgtagccatagcttgaacaagtgctaacgagaaagtttcaacccattctcctgtcgtcctaggaatatgaatggcgcaatccacagcattccaatattttggcatatctgtattttcaacaaatcccgtcataattaccttatcttcaaatcccttctcacgaataagtttccttactaattcaacatctgtgtccgagccatttcccattaacagatacttccaatttccctcctgcggaagagcatttagtacttccactacacccttatcgctgctaatgcgaatcgcacttccaaaaacaaaggcctgtcctaatttatatttctgccttatttcagttcgatattcgagattcggcctataaacgcttgtgtctacaccgacttgtgtctgaatataaatcggctccgcaaaaccttcatcaacaaataactgcttcgcttcagggtaatggcagaatattgcatttgcattttttcgcacgcatctaagtttcattttcctgtatttatagtttaacaagtgcttaattccacgatcgtaatgcttctttaaattatgctgcggacctctcatactaaacactaaaatttttgattttcggctatatatttttttaatacatatagtttccaataaagaatcctgtaaatgtgtacctatatgaaaaataaaatctggttttaatcgctttatttcacttataagtattcgagatatccatccaatcggaccataagttttcatgtcaacaagtcttacatgaaacctgtcatcgtcgtgaacttccccttgtttttcaataagttttccgaaagtatagtttttattcttgccatctacccatgttattggagcaatcaatgttacatctacatctaaatgattcttagttagaagccaccatcttttccacaaccatttctgagtaaacgcatgagatataaccattatcttaatcatcatttctgtcctccacaaagcatttgttcgtatagtgtaatgaaactgttaactgtctcatttatattatactcttcaataacttttttcctgcataaatcagaatattttatctttccatcacgtttaattgttttaatagcttcccgtacagaaaataaattgtgcggagaacatatgaaacagttcgttccttctaccaattctggtgaggccgtagaatcataaactatcactggagttccgcaagacattgcttctgccacaaccagcccaaagctctcttctgttgataaactgcaatacacatcagctgtagaataccaatctataagtaagtccacgttagatgttctttctaagtatagtatattatctcttaaatcaatcctgttatttgaatcaacaccaattataacaatctggtactcagcgcccattatatccgccaactttacaaagtcattaagtcctttgttttttgaccaatggcttgccacacccaaaatcacaaatttatcctctaatttatatttctttcttaatatactatctctatatacgaatttcttagtatcaattccattatttatagtaacaatatccttttcagacaaaatactatatcctacttccttagctaaccattttgatggtgttgtaatctttagcttatcaagtctagaatacagttttttctttttattaaactcagatcttgataaatcaaacaatgcatacttttgatgttttacatatgaacagtggttacatccatatttccacttatcacagtgctcctccgtataatggtggcatagacctgtataagcccaacaatcatgtaatgtccaaaccactggaatttcactttgcgctaaatatttaaacaacattggatagtttaaataatattgatgtatattgtgtaaatgaactatatctggggtttctctctggatttttattattaaatttttagtcgccaatttgcaaacactattctcgcaccctagatatctccctatcaaaatattagcatgtcgttggaatttactaccaataatatagtgcgttttataaaccaatacaccaccttttggggccgcggaagtaatagcacaatcccctcgttcttccaattcttgcgcaattttcttcattaataaaccagtgcttaaatcaggacatatattaacttggaatactttcattcaaatcaccctatagttatattctctgacacaagtaaaactaaattacatcgttaatttttactttcacgtcacaacagcctttctgtttcgggatttcaaatccataattggaaggatcaacacccaaaacatatatacattttgaaacaaaatcggatccaatattcctatcatagtaaacaatgtagcaattacagcaatatattttttttcatttatacaaataaatttgcaggtaagcaacatcattctagtatgccaagagaaaaagaataccatcaataacccgtataatcctaaaaagtcaatccatgtagcatgaccacctatatttgctccatttccaaatgtacctataagcgggtcacttaggaaactctttatacctgcactatactgttcaattctaatttcggcatccaataaattattcgttgagccacccaaaagtgtgattacatcttgtattttcaccttaagaagctctggcactccatcaatttggcaaatccctgtcaatatctcaggaagataactccaaataatcataaaaattatactagatagtattccccaacataccatgcttgcaatatcactacatagccggacaattagtaatacaacaactcctaacaagtagaatcctatcaataaagcaatttgtgaccgaaaaataagtacactcatcgcaaaaaaagcactaacaatccacacattccgattcttcttattatctaaaattttagaccataaatacaaagctattaataagtaacataatatattcgaaaatgtagcaactccgaatatttttactcgaccaatgctttgcattgcatttgaattagccgacatatttctaataattaacgaatttttagtcatttgataaaatgtgttaataacaaccagtactacatcgattttccaaatgttgtaaataaagttaatataatcaatattttgttgtctgtcgaaataacatgcacgaattgccaaaataataaaaatgtatagacaaaacattatatatgatttcaccaatgaagcaccgtataaaaaatacgtaattacaaaaaggataaccgcaggagtcatttgtattaaataacgccatattttatcaacaacgtcaggtttgtactgaaaaacaataataaaccataaaagcacaacaccatacattataaaacttggaattttgacttgaacatacgtaaacataccataatttagccataagacgatgatgcacgccaatatgacatccagtggcggtattttgattttaatcttatacatattttatctgcataatcggctcctcacgctactagagacaaaattacgctttccctccaatcttactctttacagtgaaagtaaaatcctataaattaatggagctttatattttatatattgtttagtcctatagcttagagatttacgcacacacctactcatttttaccaaatccggtacatccatacataccaaaatattactcatgaaaatatattttggaggtacacgttttttttcgggaacagccagtccagaagacaaatatcttctcgaattaaaaggagtaaacatttcaccaacaacatctgcctcatttgcacattcagctatccaactacccatacgatgttcccaataaaataaatcaagaatctttaaactgttttctttgcaatacggctttgcggaagcaagccaattgtcaatcgcatccaggcaaaaacttatctttggaagttggaagagtctacacaaaactttagcatttacttgccaattataaaggtttccggcagaaacccgcaaaatctcattacatgaacccttgacccacaatttttccccatatccgttggtctcaattgcctgtgccatttgtatccaatattcatgtgcattttcggaatgattaacatacttttttttaaaattctcatcaatatttttacatttaagaatggtatgaggaatacctaaactctcacagacagtaccagctacgatgatatcctcctcattatccgtcatccaatcatacattaaagtgacaacatcatacttatgttcaagttcagaacacgctgccaacacaactctcgaatcccatccggcagttagtgtaacaactaatccattcttcctatgtgctgccttcatcgcatttctaagtgaagtcacacattcagaaaccgtactattgttttgtttttttttcactgtgaggttacttctctcaacctttcgttgattcaaatcaataaaatgatttggaagtagtttcttaacttccgtatataaagtagtatcaactggccatgcatactccctatcatttttcatcacagttgccaaatatgctgatgcttcatgatccggctggtagttcttgcaatatgcaatataacgtgcctgagaagctaaaatatcaaatttattatcataaaaaacttgttttaacccacaggcatcgtgccaacaaaacatttggttagcaacacagacaataacaacccatcgaccacaccaattttctgtatactgtggtcccactgattcgacagtaactttggtcagcaagtcatcacacattttttctattgtattttctggcaatgctacatctacagcgttaccaagtacacatactgctttttcatccttttcacataatatgtatttacaggaagttccaataaataaattatacccaccaatagaaacacatttctcatacctcatcgaactattatttgtctttgaaatcaaatattggtttttccctatatacatatttactcacacacctcatcaactagttttatgattttattacattggttcgataaagttttattatgataaataaaattcttagccgccgtccccaatgcatttcttttattttcatccaatgcaaatacttcttgcaatgcattctttattcccttaatagactcatcttctatacgatattgatattctctatattcatctgcaaaacagggcagatttgttgtcatcactggggtaccacttgccatatattcaataatctttgatggaaaagacattttcactatttcaatatccgagggtctcggatctacaagcaagtctgcgtccacttcaagctccaaaaccttttcatgaggaaccatccctaaaaattggatagcattattcttttctgtaatcttgcgtaattcatttgcataatcgccatcaccacaaagtataagcttataatctttaatatttgattctataaatgcatgaactaatttatcaacaccaaatttagaactaatttttccggcataaaaaatgaatctttgtccaccaattctctttgtatctggaaaagaagctatgtcgcacaaaccatctactacgaccgcaggtttgtttcctttattgactacactccccataaattgacttaggaatatgtaaccatcaatgcaacttctgtatttcttagaatttctaacatctatcttatttaatatcttcctaataaaggaataatcctttctatatgtcatcataagttcgggaatatctggcacaattgcgcatacctttattccatacttcttcttcaaatattccgccggccgaagcagactgcgatataatccactaatcacaatcacatttttcctatcggagttgtatgattctttgatatgcttctttacgccctgaaaatagcaatactcttttatgattggaaatgcaagtaatgtcggtacagttacacgaaagtcccccatactaaaacttccacttctattcattaatcttccatatttaggccaacttggtataggcgccaacgacactccatctacatccgcatattcagataatcctacacccacatttctatcaaatcctactccggaaaaagttggcttaaaacttttacaattatccgtaatttctgagtatatatcatccgatagtgcagtggagaaataaaaaatattttttctcatttttcactccatcacagcagaaaaagcttcgtaaaatctttcattctgctctctagcctttgccatatataaatcacacgcaagaccaaacctcgttatatccaatccagataagtattcataaaggttatctcctaacccctcatatgtattgatcacatatcctatggaactagtttcaagttcttttgatagttgtgtattctcattcgcaagcaccggtatatgcatactcaatgcggtatataatcgaataggaatgagcgttcgattatcaagcgcatcattgccaaatgcactgtttaccatatcaaaaccagaaaatattctaagagtctcatctttgcaaaaccctggctttgtaaacacatttttaatccccttgcttaatgcatattcttcaagaacttctgaattagtaccacaataccataactcgaaacgcttatcattagccagtgcatcaatcaacttatagcattctctaaagtatctgcaatttccagcaaaccctattttatacggtggtgtactgtgttcatcgcgctcaacagtcattccagataatatatcctcatttatactgtttacgataatatactctgcttcaggcaaaaactccttaaatccgtccgaagacaacgcaatcattcctgcattcttcactagttttttgataagaaaccgtccccaaaaagtattttctgcaacataatcccgcacattgataatatagtgcttcctatacttaaaaaataattgatcaaataataaatatcctacagtcgtttgccatataataacagttttatacgtttttttcttaagtaccctcgatataaaatgccgaaaccccataaatccaagcacccgacccattttacctttcttagaatggtttctgtaacaatatatgttggcagctgtgctctcttcgctgataccatatctatcccaataaattaaatcatatggtatatcttttttatctaagtatttggtatacaacgaaatcagggatatgtgctttaaattcgacgcgccaataatgcagactcgattcatattttatctcctacatttagatactatttgattataacatacatcagtggtataatttttttccaaatattctctcgctctattgcccatttcattaatatctgattgcaaaaccctctccaccatatcaacaaaggaatcttcatcatcactgctgcacttccagccaaaacctttttcttcagctataattccaacatcagaaacattatctgtaacacaagcaatcggcatacagctttccatatatggtaaaattctagatggaaaatttggaatagtgaagcgatggtccaaaaataccattccgacatctgcgcaccgcataacttcaaaatatttttcccgtggaagatgcttaatcagttttacatttaagggtctatcattcttaataaatgtttcgatttttccatattcgctaccgtttccaacgataagtacaaagatacgcaaatcaccagctacagcctttaagcagtcaatcataaaatcaattccttggggcttacctaaattcccaccatatataaaaacacaagccccctccggcactccatagtcctttctttttcttttctgctcttctctctctcctacagatatcaaacatggtgttatagcatttggacaaaaatcaattttatccttaatatagctattatgcaaagttaaatattttacatttgctagagacatacaacctatataatcagacactgcatacagctttttttccaacatgcgaaaatatttatgaataagactgtttgcagatataagaccaatatctaccgcattttgcggaaaaatatctttcaacattagatatgttgccgcattatgtttcttcttgatacttttaacaaccgaaaccagtgtgatcggtggagtcgaatataagataaggtcaaactttatacccttaaaaaatgaatctattgcttttttgtaatctcgcgcaagcaacactatagatattcccttttcaacaaaactacaatttgattgatttccgactttaacccgaagaattttgcagccacaggaatctaataatgttgtcgaagaattatttcttcgctcacaaggagtgaccacatacaccgaatgcccttgactcataaactctcgtatcaaatcctgatatatatcatgttcactaatatcatatatttttgacagagttaaaaacaataccttcattttcatgatcctttatttcaattcttcttttttgcggattactacgctgtcatacatcatcatgacgacaccctcttcatagttaccaaattgcggtatattaacattaccgtttaaattattttctatcagtttaataaaatcaacaccagcaccatatgcgtgtaaatatgctccgccaaagcgtggattcacctcagacaaataatagataccattacgataaaaaaaatccatatcaaccggtccattgaacttgaatttcttcacaagtgattgaatgaaattaaataatttatcatctttaaaagataccgttttgctcgcaccaccaattcgagtctctatcttatgttttgaaaacgcgcttactgcttcatggctgattgtatcgatatagacatcaacgtccaaatccgtaccatacataaattcttgaatgattagagacatatctgaatgcatagccacatccagttcttccatggtatgaatttttctagcaccgacacttccacttccggttctcggttttacaaacactggaaattcaacatttccgttggtaaacgctgtctcaaattctgctaatgttccccaagtttccacagtattgataccatgttccttcaaataaaggaacatcaagtacttatcaaagcaaagctgagcggtttcctgatatggtgctaatacctcaacgttaatattagcaaaacgctccctgttctttgataacaactctatttcaggatcaataaatgttgttatagcatttattttttctttacgacaaatattaatgatagtatctacatatttgggatcgtcaattcttggtacaatatattgtttatccgccaaatacaatgccggtgcatagcggctattatctgtagctaccataatagaatcttcaggaattgactttttgaaatactttagaagttcgccacgtctacccacactacaaaacaagtaattcacaacttatacctctcttaatattatatctttttcgttttcatcggattctttggttccagtaaaactctccatagtatcgctggacgcactactgattccatctctcttcaaaaccacaagaaccgtgtcgaaaatgatttttatatcgtttttaaatgtaacatcctttgtatattcaacatccagcttgaagcgttcttcccatgataatgaatttcttccatgcacctgcgcatatccagtcaaacctggcctaacatcgtgtcgttttctctgctcatcattgtataatggcaggtattttacaagtaaaggtcttggacccacgatactcatatcgcctaccaagatattaaaaagttcgggaagttcatccaaactagtacttcttaaaatccgaccatatctattcagtctcatatgatctggtagaagattaccttccttatccctactattatccattgtacgaaatttaatgagcttaaaaattttctccttaccatccttccccttcttaccaggtcttgactgaacaaagaagggatttccacccatggcaaatgaaccaagaataactaaaatgaaaaatataggaaacaatacaataaaagcacaaccagacaaaacaatatcaaacaatcttttaaagaatcggctatacattacgcaaaacacccttttatcacttcaataattctctcctgctgctccatagtcatcttattatcactcggtagacacagtccccgatggaagatatcaattcccacatccagtggcttaccatcctttcctactgtccccccagcaatataagcattagtctttgcccttccatttccttcccttgtaacaaaaccattcatacgatatattggttgcatatgcataggtttccagatagggcggccttcagcgttgattcctgctattgcctccagtatctctgttggacagctctttccatgctccccaacaaacaaagctacgcattctcctctcacctgcttgcacatagcctctttatcgactatcatgcagcttaaccagtaattaggttctgacttctccgcgtcgtatggattcatcttcaccggtagatctgctttttcaaaggcatccttatatctaaaataaatcgctttcttctgtgtaatatgttcctccagatgcggtatctgtcctcttaccacacctgcaatcacattgctcatgcgatagttatagcctaattcttcatgttggtaccatggtgcattctcacgactttgtgtagaccattttttcactttatttaccgcatccaaattatcagtcaacaacattccgccagatgaaccggtaattattttgttgccattaaaagaaatagcattgtatgtaccaaatgtacctgtctggttttctataccacctgtacaactacctttatagtaagcaccaaaagactctgcagcatcttctataataactgcattgtgtctatcacaaatgtttttaatctcatcaatctttccgggagttccataaagatgtgccaccactactgtgcgcacatccggatagatttcaaaagctttttccagagccacaggatccatgttccaagtgtcatattctgtgtcaataaatatcggtactccgccctcatagacaactggattcactgtagcgtcgaaagtcatatcagaacaaaagaccttatcgcccggtttcacgcctgacaatttcacagccatatgtaatgctgcagttccgctggaaagtgccacagcatatttgcaaccaacctttttggaagctagtttctcaacctcactgatatttttaccaaccgtactcatccagttagtcttgtacgcctccattacgtaatccatagaatccggatacatagtgggcgaactcagccataccttctttgggaatggtttatattttctgttgttctgatacattctttttctccctatgtttgcctaattcatctattttatctaaaaactaatctaattgtatctaattatcatcgctctactgctctaaaatttgtaccattatgcataaaacttcttctcatcagttacagccacctcgctaaatccactctctattacatctaacatcttctccccatctcctcgatacggatgataagtggaaaccatatctgtcacaatacttacgatttccgagctttccgcttcactataagcattcaacagctccaattgtctaaagaactgctccacatccataggaattggcttgccaatatgaattaactgattaggcgtcttctgcataccctcctcttccataagcttctcttcataaagcttttcaccaggtcgtagccctgtataaaccacttgtatgtcctcatcaggcttataccctgacagcttaatcaaatttctggcaagggtatcaatcttaacaggctctcccatatcaagtacgaaaatttctcctcccctggcataagtcccagcctgcaaaaccagactcactgcctcagggatggtcataaagaatcgaataatatcgggatgagtcacggttaccgggccgcctttctcaatctgtttacgaaaaagtggaattacagatccattactacctaacacatttccaaagcgaaccgccacaaattccgtgcgaacctttttctcatattctttttctccatctgaataattctgggcgtccgttggaatatacagctttctccttccggtagccttgtccttatatgtacgcagaagtggcagcaaatcccatcttccactcttgcttacctgatccatactctggatcaccatctcgcacagccgtttgctggctcccataatatttgtcggattcacagccttatccgtgctgatcagcacaaatttttgacagccatttctaagagcagcataagcagtcttgtaagttcccatcacattatttttaatagcttcgcaaggacttgtctccatcaatgggacatgcttatgagcagcggcatgataaacaatctcgggcttataagtttcaaataccccattaatccttctggtatttctcactgaaccaataagaactgtaaggtttaaatcaggataagccgccttcagctcctgctcaatgtcataagcattgttttcgtaaatatcaaatataatcagctgttttggctcatgaccggcaatctgcctgcatagttcactgccgatggatcctccgcctccagtaacaagaatggtttttcctttgatatactggaatatctcatccatatttacttttatgggatctcttcccagcaagtcctccactgccactgccttcatcttgcttagggacacctcaccattcactagctggtatacgccaggaaggcttttcaattcacagccggactctttgcagatatttaggatatctcttttctcctgcgcactggctgaaggtaaagcaaccagaatttggtcaattttatatttttctacattcaccaaaatgtcatctcgaccgcctacaacgggcacaccatccacgaaccggccccacttatttgaattatcatcaataaagcaacaggccttggcattggtctctattgcatttttcaattctcttaaaattacctgtcctgcggcgcctgctccgattatcatcacatgatgctctggtgtttccggcgcgctcccccgcagtcgattcctctctagcaggataaagcgataagagaatctgattcctacaatcatgcaaaactgtaacagtgcccctaccatatagtaagaaaccggcatcctatgcataaagaaggtaatacctacagtgtgaaagatcgttgtaataacgcatgctccactgatacggatcagctcattgaagccagcaaaacgccagatgcttttgtacaaacgcatataccaaaaaattacgatcacaaacgctgtatagaaaggggcaaagtgtaggtaagcagtcaggttttcagcgggtatcttggaaaacagaaaatcaaaccttatccatagtccaaaaaaataggcgaaatttacagcaacaatatcatacaaggtaagaaacactgcaataatctgccaatgctcccatgaaggcttcctgcctgcggaaatttccggaccatctttatttccactcatactctcatctttagctctcattcttctctacccctccctacagggtcatttcaatattgataggatattctcaatccgcttcactgcttgcttgacattaatctcttatttggttgctggtgctttagtttcctcagtcttttcatctgccttttcccgataaaccaaacatacaggagacagagaatggaaggaggcaactacctgattttccaattcctcatcagaagcagatacagtttcatcttctgcttcagtcttttcttcctgctcctgattatcctctgcttctttcttaatttcagaaggtttcttagtatttaagagttcccatccgtgcttatcgcaataatgcatagcaaagacctctatatcatccgtcagattattggcggtaaatgttacattcaccggatcttcctctgtaggctcaatgccctcaattaccagttccttgacaggagtaaggattttcaattcatccagcttcacgatttcatcttttatcttattatccgtaattttcttattatcaataaacagatgaagatcgatttctggaagttcctcatcctcttccgtatccttatctttatccgaggaactagtgcgcttcagtctgaaaatcttatccaaagtaatatcttcacccatcttatcaacagccttttctaccgcttcctctattttttgattaattttccggataattgtgacaacctcttcctgctcctggtatttctcaaccagctcctcgtttgtcttctcctccactctaactattcctttgtcgctctctacccgaggcgcatcaaacaccccattaatactaggccttgccatagccggcactgctgttcctaaaatcatccccaccgtaagtaacattgcgatcatttttttgtttttcattaagaaatacctcctttataatcattcttttcttccacttgacaccagcactgcctgaagcacaaaccgcttctgggcatcttccggatatcctgttgacagagccaggattttgtcctggacgcttacttttctgtccttatccacatggtttttcaaccctctcatttgataaatatctctgatataagccgccagattttcttcctttttcaagtcccttttcagcagcaggtggctgtcgtcattggcatatgcggcaaatatttcatactgaagggtatcctctgccgtatatactgtaagctgacgatgctcttgaaaatactgggcatcctcgtactccagaaggcttcccagcatactgccgtcctccatgcggttcccgtacaaaacggttacagcgtcggagaagtccttgctgttatagctttctgtgaatatggcgcctgcctcggattcttttctacctgcatcatgattcaggtaaaagctgttatcctcaggactttgaacaactggataagaaatcggcgtgccttcgatctccagccaggcatacacatccgggttgtcggcggcaagctggcggtaggcagagggcatttcggggttattcagggggacagcggcaaggcgttcctcctgggcttttctggctttttcctgggccagaaactgtttttcttcttcgttttttacatgtatttgataggcgagagctcctgcacacactagcaggactgtgcctgcggcaattccagcaattatttttcctgtgtgccttcttccttttctcatgactgtctattcctttatctcattgtagaaaacatccagaaccagcttcaggagcttttcatcgtctgcgtagaattcttcatagacctttccctgacggatctcgccttccacattgtggatattgctgccggagaaattcatggaggtcatctctgacgccagatacactgcttcctccaggccgatgtttgtgaccatctggctgctcagctcctggtacaggcctgccacaagggtaggattattttttactgccttcagggctgcatccataaatgccagaatgtactgcttctgcctgctcatgcgcttttggttgctgccgtcctcatccatatcccggtattgaacgtagcgcctggcctgatcgcccatgagggtgacggtttctccttggataaatgcaggatccacattggttaaatcctcctggactgtaacggtcacaccgcccactgcatcgttgaggggctcaatggcattcatgagaatggccccgtagccatgaatgggcaggtcaaagaataaggtggacaccgcttcctccattaggagacagcttttctcctgaccgtctccgtaggcgaaggccagtcctaagtgattttctgattttcctgtctcggcacctgcggcgtcaaagttccgcataagggtcatggtgtctctggaaacggcaatgatgtgtacctgttttttagctgtgtcaaggaccagaaggaagatggcatctgcctggcctgcttttcctgagatttcctgtttttcaaaggtatcttcgtgtttgtcaattcccatacagaggatggagataatatcctggttgtagcggtattgttttccaccgtattttacatagttgggatcatattcctgtgcaggcttttggtccttctggatagttgcagactgctgcaggtcaggagaggcggttttggcgttttgctttaatgcatccttgcctgctgcttttaagtattggaaaacacctgtgggaatcagcaccattgccagaagcacggtcagggtgatcagtgttcgtttcaggagcttttttcctttgctgtgatatttcctctttcgtttccttttataataaggggtatacattttcactgacttcctattccacaagtacttttaacactgccccgttagaggtatttccgtcagagtccaccacataacagctgatttcatagctgccgggagtattggtatccacggttccttctgtcatcactgttctccagaggtcgtaatggttgtccttgtcatcctcaatatcctttacatagtccaaaacctcaaagtcatcacctgtatgaatgcgcaggtaataggtgctcagatatattctgggagcttgggccggcagggcatcaattttcccttcctgctctagtctggcctgctcttccaaagccttatccgcttcctggcttttattttgtttgtctgtgctgttcccatccgaatttgtatcagattcttctgcttcctcttgggtattactggtttgggaagcttctggggttttctgggaagtattctctttgggaggttcttcacttccctggggattttcatctgttttttccgcaggatcgtttccgccggaatctttactggatgagtctttatccctgggtgcctcgggggaagcaccttcttctttactggaagaattatcatcaaaagccttttcacgggaaccagatgcctttttctcagcttccttattttccttgtcatcggattcctgtttttcctcttccgatgtttccttatgcctctgggcagcctcctggctgtccggcagatagcgctttactttcgttacattgttatttccatccttggctgtatagatcacatagcagccgtcctctacggtgtaaatttgttccacaatcaaactgtctgtcacatcaccgtctgcctcatcgtaggccttcactccatccaaaagcagctccttatctattccctcttgatagatcagggtctcttttggaaaactgatctccggtcccactctgtcattggatgtgtacagccagtagactgcacctccaaggccaagggcacaaacaatcaaaaatatggtcactaattttctcatcagggctgttactccttattgtcttttccgtaataattgccttttccgtagtatcctccatagctgtagtagcggctgtactttccatatctttttccgtaatagcccttccggtctatctcaactttatttaaaaccgctcccaaaatgggacagttacatcgatccagctgttccttcacctcctgggcaaagcggtagctgatagtctctggctcaatgacaaaaatggaaccatcgcattcttctgcgataatggctccgtcaatcacgcttccaaggggcggtgtatcaatgatcacatagtcatagatctctcttaaggtaacgatcattttcttaaaattctgactttccagcagctccgctggatttggagggatcttccctgcgaatatcacatggaagctggggatattggtggtgtacaccacgtttgccaatgcttcctgggctgacagaaaatgagataagcccttgatctccatatcttgtgactctatccgcctgtacaacacggattttcgtaagtctccgtccagcaggagcacttttttcttggcttctgccagggatacggccagatggaaactcacattgctttttccctcattgggggtacagctggtaactgcgatcacttttttgtcctctccgcagaactgaagattggttctcagggatttgtaggcctcatctgcggtgtggttcagtctttcctctttaatggtaattttgttcatggttctttatccctttcttctgtgatggctgcgcttagactttttctctgtgtccatgatggggatagaacccagtacactgatgttcaagtagtgctccacatcgtcaggggttttaatggtatcattcataaggtatatgaaaatgatcactgctgccgccagaaagccgcccacaagtccgcccagcattccgttctttgtaatgctcggactgctcttggcgcttgggatattagcttcctctaccacattcacagcctcaatatccattaccttctggatatgctccgctgcttccacgcggatggcattggcgatctcgcttgcggtgtaagggtccgggtcccggaccgtgataagaataattctggtatctgaaagtgcctgtaccgtcattttgcccagcagagcctcatggctcaaattcagattcatctgggcgatcacggattctgtcacagaccggctcttaataagctctgtatagtcttttgtcagcagggtgctggtctgcatgtcctgattggtaagaatatcgctgtcctgcttgttgagcacatacattttcgtggtggattcatactgaggtgtaataaaaaacatgctgtaggccacagcgcccagacaggctaccactgcgcagagaatgataattcccgccttttttaacaaaaggtaaaagatttctcttagatcaatttccagttcttctcggttctgttgttttctttccatctttgtttccttatcttaattattttcaagcattttccggggattctctgtcataatctggacggcgtaatctctccccatttttttctcaaggtattccatacagcttttcatataaaaaggacggtgatgcacattatgggcatcggaacctaccaagtccatccaatccctctgcatcagctttttgcacatcctttttgttccaaaacctgcctttcccacaatgctctgggcatttacctggatcaggcagcctcttttgcgcagctcctccacagtggaaagggtggatttcactgcctcataccgctcgatatgggcaacaattggaatatacccaaagcggaacagctcatttgtgatctcctccatagaggacagggtggcatcatctgcaaattccacaagaacatgtctgccgccgcccatggtatgtacctggcggtttctgagaagcaggggcatatccgtacaagcatgaaattcacatccacagtgtatggtgatcccataccctttttcatcagaccgtgtctgcagctcttgcacctcctgggcaatggtctgggccgtgggccggaacattccatatctataatgaggggtagcggcaatgtgccggattccttctttattggccatgtccagcatatccagggccccggtccagtcttttggcccatcgtcaaccccaggcagaatatggcagtgtatgtcatacaattctttggtacccatattgatttctccatttattttcctaaattgggtctgattttttccaaaatttgtatttaggaaatttcatccatagtatagtctctttagtgactatagtcaagtataagactacattttatgctaatgctataacattgtttcaaaccacgacgggcagcttcaagagtgcggccgtttcttatttaaatgtttaaatgcgtggcttgatgttctgccagtggggggataccggttcctttgtgcccgccgctgccgtcaatgttgcttttggtgataccgctctccacccagcagtggggtgaacctttacttatttcgttgaaagaagacttgcttatgattgattacagccccttttggaaaacccttaaagcttccagcgaatccacctatacgttgactatgaagcatcacctttcaagttcaaccttggataagctgagaaaaaataagccggttaccaccacaacacttaatgatttgtgcagaattttgaattgtaggattgaggatatcgctgtatacatcccttcagatgaagaccagcggctctaggtcatgcagccctccttccttcacagggaacagatgaacccttagttcctactttgttcctatttcaaaaattgtttttaattgatacgaatgtattatacacccatcaggaacttttaggcaatactttttatactgttagttcctgttttttattaatactgaaatctgaagttttttattgatttgtcttatagttcctataaaacctcacttctgtgctcatattttactgtaaaatctaacatccgaaggaatattttaccctttaaaagcaaatctgcaaaaatacatcaagaaaaaatctccgagaatccatttgcttaaagatttatttaatctagatttttccttttggaacagcagccatgtcatataagggaaaattggaactcaaaggcacattttataaggaaaagcggtctttttcgtacatcctgcccataccttccagagagttttatttgttttgtagaatagaaaaccaaaggaattctccatataatttccatttttttattgaagtagcagacttttatttaaggattttccatgtgatatgaaaggttaagatgatttcaaataccatttatgccatttaagacgctaaatttgccattgcgtaaaaaaatatccagtttcttacaataaaaagaaccggatatttcctctgaaatctaatctttaactaacatttagtgtagaataatagtttaacttgattaaataaggtctttttcaatacagcaggctcatgaccaaagagaaactgcagctttccaaagcagacgccaagcgctctctgattttggcctttgcctaggagctaagccagaactttctggatacttacaatgattataatgcgacggtcaccgatgcggcccagaacatccgcacgcacaccacaaaaacacccgccgtggaatctgcgggtgttttcgtaaactgactgttgtatttcctatatttccctgacgctggcataaaagccccttgtcctttggtcaatcacctgggtctgtgtaatgtagaattctccttccagacgaatgtctgcactggacgcccccacaaggagctcaattgttccttcctccaccacccagtccatggacgcgttcaaaaaagcggtctgggttacttttaaggaaaattccaaagtctttttctcaccccttttcagaaagacccggtaaaatcctgccaactctctgtccggccggaccatgctggcagtccggtctctgagataaagctgcacaacctcgtctccgtcaaagtctcctgtattttccacgtccaaggtaagcaccaccgtgtcctgagggtctgcctgggaattttctatgttcagattggaatattgaaactctgtataagaaagcccatgtccaaaatagtataatggaaaagcggtatcattcatatatccattgggatttcggatcatgcctgtatgacccgcccccacatatccgctccccctgggaaggctgtaatacaccgggatctgtcctgcatttctggcagcagtgacaggcagacggccagccggattctcatccccaaagagaagcttacacaacgcctgtccccccatttctccaggctgccacacctctaagatggaatcaaaatgtgaggccacatattcactggacagggggcggccatcgaaatgaaggaccactgttttcttattcagcgcacgcacccttctggcaaattcctcctggcagccgggcagtccaatgtctgtggaatccacgccctctcccaccgtggagctggctccccagccgttttttcctcccagggtaagaagcaccacatctgcctgggcagcgcagttcaatgcccgctctatgcctcccagctctgttccagcatggttgatccccttttcataggtgatctgtgcctttggaaggaattctttcaaggcatccgcaaggcttctgcactttggaaactgcctgcggattttcttctcgatccggggagaacagtcccggatctggcccacataggcctggctgatatcatacacaatcagtcccggctcctcaaatatctgtccgtcctcttccctggtggccgtcatatccagaacagccggataggaaaaggtcccaaaatagctgcgcacactgtcaccgtgaggtcccagtaccgcgattttcttcgtgtccttttttgacaggggaagacaatggttttcattttttaaaagggtgatgctttctctggccattttctcattgagcacatccgtctcttttctgtgcaggcaagactgaagagcttttctgtccggataaggattttcaaaaagtccaagttcgaattttacccttaacactctttctactgcctggtcaatggtttccatacgaagccttcccttttccacctcctccttcagggcataggtaaagcccttgggccttggatactccacatccaggcctgcctggatcgcccgtactcctgcctgggtaaaattctccgccacacaaaatgggtctaccagacggtccactgacacataatccgataccacaaaaccggcaaatcccaaattttcccgcagaatctctgtaaggagataataagagccaaccactggctctccattcatggaacagtaggaattcattacactggcaaggcctgcctgggtaatggctgcctggaagggtttgcagtgcacctccaaaagctcccttggggataccagatttctgcccatgttcagcccgccctcggtgatcccatggcccacgaaatgctttgccgtggccgccacgccttccttcaggttgtctgtctgcaggccctttacaaatgcatttcccatagctgccgtgagggcaggatcctccccataggtctctgtcactctcccccaccgggggtccctggcaatatccaaaacaggagacagtgcctggcgaaatcccactgccaccatctgctgccggatcagatccgccatctcccccacaagctctgtgtcaaaggtggccgcctgggccacagcgctgggaaatacatttgcctccgtaaactgtgcaccggcacaggcctcgcagtgaatcagggccggaatcccaagaggggtctcctccaccagaaatttctgcagacgctccacgtattccacaatctgctgcacatcctctgccacggtaaatgcccccacgtttccaattccctctggtacatattctttaaaatccggtatatccggtgtgatcgtcaccagacaggtgatttgatcaatcttttgttcaaatgtcatcctggccattaaatcctctaccctctcccggacagacaatgacggatccttatacttcatagattatacctctttccttttttccagtgatatagatttcacatgatgcaaattttacagcaaaggggccagccctcatgatttgcagccggccccagtattccattcctatgtttacttcgttatataatcctctgcattgtccttggtaacctggctgaaaggcacgtacacatcttcgatctctgccgggtccacgccctccattatctgggaaaataccttcgcgccagcttttgcctgctccctggcattttgaagcacagtcatggacatctcccctgcctgaaccgactccaaggccgcatcgcttccgtcaatgccgatgaccaggacgccttccagacggtctgcagatttgagagcctccacaacacccaaggcggagtcgtcattctggcatactatggcatcaaaggattcaaatgcctgcatacagtcctctgctgtgctcatgcccaagtccttttggttttccacattatattctgccagaatctcaatatcctctctctccttcaaggtgtccataagaccctctttccggtcaatatactgctggtcattgggacttcctgtaaaataaagaatcttcgcctcttttggaagctctttcaccagatattctccctggacaacgccggcatcataattctgagaacccacataaataaatttctcataatcgtcagcgtcccgcacggttgtcaaaaaggacacgtaaggaatatccgcgcttctggccgcttccagggcaggcacagacccatccaggtcattgctgatggcagacaccacatttgctccctgtacaataaagtcatcgatctgaccattctgcacattcgtatcccccgccgcgtctgtgaccactatgctcattccaagtgtctctgtctcctccttcaggtaagagcggaatttggcacaataatcataggtgtcactgttattggcaaaaccaaccagaaactcctcctgggcagacaccgggcttgccatggccaccactgccgctgccgccatcatcactgctgctgtttttttgttcatctttttttcctccttttttattacaggggacatttttcccctatcgtttcgttaacaggatacttccaggcctccaccgtaggtgctgtatccctacggctttttccttggctttcactgacttttcttatcttcctttgtcttcatgtcaatgatcacagccccggcgatcagtacacctttcacgatgagctggtactgggtggagacatgaagcagattcaggatgttgttgatcagtcctacaatgatggaaccaatcaaggcccctgtcaccgtgcctacacctcccaggaaactggttccgcccacaatgactgccgtgatggcatcaaattcatatccctctcccacagagggcatacctgccataagccgggacatcagaaccacgccggacaagcctacaaacgcaccacttaaggtaaagatcacccgcttcatgtgttttacccggactccggatgcaatggccgccttctcattgcctccgatagcatagatggcaactcccagactggtatatttcatgatcacggccaccactgccactgccaaaagcatgacaataaccggaacgggaatgggtccaatggtcccctgtcctagaaagcgaattttcgtcacccctcctatggacttgccatctgtataaatctgtacaattccctttgctacattggtcatggccaacgtggcgataaagggctgaagcttatactgggtgatcagaaaaccattcacccagccggcagtcatgccgatcaagatccccaccagcaccgccaggggcacatttcccgtggccgccaaaactcctgctgaaaagcaggctgaggtggtgcacaaaagtccggctgacaggtcgatcattccagaaacaatcagcatggtctccccgcaggcaatgatcgtcaccacggaaatctgcttcaggatatttaacaggttctgtaccttcaggaaatttcggttgatcatggcagaggtagtaaacaatatgaccagaatcagaataattccgtattttcggtaaatgtagctcagctttcttgtgtttttcttctcgttcatcttttacttatccacctccacaattttcttcatgatcctatcctgggtggcctcttccttggaaagctccccggcgattttcccgttggcaatgaccaaaacccggtggctcatggacagaacctcaggcatgtcggaggaaataagaagaatcgccattccctccctggccagctccacgatgagacggtaaatctcctgctttgctcccacgtcgatgccccgggtgggctcatctaaaatcaaaaccttcaaattccgcaccagccattttgccaggaccaccttctgctggtttccaccgctgagggttcctgccaatgtatcaatgctgttggctttaatattcagcctgtggaaaatctcatttacagcctgccggattttcttctcatttaaaaagccatgatctgcaaataagtcgctgttggccaaaaccacgttgtcacggatggagcgcactcccacaaatccatatgccgcccggtcctcagtgaccatggcaatgccctggtccaccgcatccttgatatttctgattcttaagggcttcccatctatgaaaatctcgccctggtcaaagcagtccatgccggaaaccgacctggcgatctcactgcgccctgcccccatcattcccgccaaacccagaatctcaccctggtagatttggaagctgatcccctgaaaaatcccctgggaacctaaatttttcacctccagcaccaccttgtctttcggaggacagataggaggatagatttcctggacctctcttcccaccatcatggaaataatccggtcctggtctatgtccttcagctggccggaaccaatgtattttccgtcccgaagcactgtgtaatcatcgcagatctgaaacacctcctccaggcggtgggaaataaatacaaaggcaatgtccttcttcttcagttcccggattttttcaaacaaaagactggtttcaatgcctgtaagggcagaggtgggttcatccataatgagaaccttcccgtttctggatatggcctttaaaatttcaatcatctgcctctgggccacactgagatttgccataggcaaaagcgggtcgtaatccaggcccataaaacttaagttttccctggtcatctccagacgtctcttcttatcaataaaacccaaggaatttctaggctctctgcccaaatacaaattttccgctatggaaagctccggaacaaaattcagctcctgagatacaatggcaatgcccatgtccagagcgtccttttcgctttttaaatgtaccggtttgttgtagtaggtaatctgcccctcatagtttttgtaagttccggagagaatcttcatcaatgtgctcttgcccgccccgttctctcccagcagtgcatggatcctccctgccctaatctgcatagttactccgtccaaagccaccactcccggaaactccttgcggatattttccaactttacgatcgctttttcttccaatctcacaccccctgtatccttccgttcgtgcccttccgcctgcagttttccgcctgtagtcctctgccggcatcttttagcccgtgtccatctgcctgtaaccttccttatatggattaagcactaaggcattatcctctgtttatcttttgtttaatcgttttaccagttatttccatcttttgagatttgttcctgtctatttattgctataataacaagtattctaaataaaatcaactattttttgctgtttttcacatattatttgcaagttaattagtttaatcgtttaaactagctttctgtatttcttgctatcctggctctctctatccagcacttcaaattaggcatgaaaacttctttataactcaaacaaaacttttttataccctcaaacaaataaatgactactcacaaaaatcatgttatacttaattacaattcatatattgggggattgaacatgaacgagacaaaggggctaaaaggtatcttacggaatttatatgtgctgctggactggcggcagaaaagaaattttgttttcattcttatcatcatgatcctttctgccggtttgtcccagcttacccccaaggccatcggctggctcacagacgatatcttagtacagaaacaggtggagtttcccaaagtaatcccctttctggtcttcatattagtggcgaatgtatccaatgaaatgatgaagattttaagacgggttctggttgaagacactgccaccaaaacggaaaagaaggcccggggaattgtcataacgtccctgttaaaagcgccgttagcttattttaagaaaaatatgacaggaaacatacatggcaggctgaaccgttgtctggagggcaccattaagcttgaaaagctcatctttatggattttgcgcccgccatcttcaacagtgctgctgctattctcattattttcaccaccctgcctgtgatcctggctctccccatgctgctggtgatccccattggaatgctcattgtctttcgtcagatcagcacccagcggggaatccgggtggaattgctggagactaagtccgctatggacgggacgattgttgagctattaaatgggatcgaggtcatccggatcacggacagcattgatttcgagaccggccgatttaataacaaatccgaatttctaagaaaaaaagaaatgaagcatcacatacagatggccaaatacgacagcctaaaatttataaatgaagctgttttcacggttctcatgattggaatttccacctacctggccacccaaaatatcatctctgtgggaagcgttctcactgcatatctgtgctttgcccaactgatcaaacccttggaggagctccaccggattttggatgagctgtcagaatgcattgttttagcagaagactttttcaaaatgacccagcttcccaatgatttttctttttctgccgtaaaagccaaagaaaacccaaaggatgttcctggcgaaattgtatccatagagcatttatccttcggctacagtgccggtgaacggattttaaatgacatcagcctgaaaatccacaaggggatgtatctgggaatcgccggtccaagcggctgcggcaagtcctccttcattaaagtcctctgccgtctggaaaagggggatggacagatccttctggacggcaaaagcctggacaccctgtccagaaaagaaatttctcagatcatcgccctggttccccaaagcccctttttaattgccgggaccatctatgaaaatatttgttatggactggaaagggaggtttccttggagcaggtggaggaggcggcaaaacgggcctatatttatgattttatcaacagtctgccagagaaattcaacactgttttagcagaaggcggaaataatttatctgggggacagcggcagcggatggccattgcaaggattttcctgagaaaacctaaaattctgattctggacgaagcaacttccgccctggataatacctctgaaagacatatccaaatggaaatagagaagttaaaaacagaaaatgaaatgaccattctctccatcgcccacagactcaccacactaaaaaactgtgacagcatccttgtgctgaacaaaggcgccatagaacagaccggcagatatgaggagctcattcaaactcccggcattttcagcgacatgtattatgggaaattgaaatagagggcagcgtccttcacaccagggcaggctaaaggcaaatgctttcgccgcatacaattcgccgcatacaaacagatcagagttacaaacagatcccagtaagaaaaaagaacatttccacaggaaaaaacaggtatgaaaaacccctgatccctgtgggaatgttcttattatcgtcttgtggtgcttcccttcaccagcagcaccggtttataataaatgctggcccgggagccgtctcctgcttctcttctggaattttcaatggactctaccatcttaattccaataatactgcccatctcctccgctggaacatgtaaggtacttaagggcacctccaaagaatccccgaagggaacattgtcgcagcccacaatggacagatcccctggtattttcaccccatactttctggcgctttgataaatcccgaaggccatctcatcattcatggagaatatggcagtcaccttctgccccaggagatatgccagggattccttcccacttttcagggtgtaatttcctgcatacaccagcttgtcgtcaaaggggatccccgcttcctcaagggccttacgatatccctgcatacggtccaccgtcaccttgaaatcagaggtcccggccacacagccgattctttggtggcccagctccagcaggtgctgggtggccagataaccagcttggacgtagtcaaagatgatatccgctcccggacaggtgaaaccgctttcatccatggtgatcaccgggatatccagttcattcataaacgcctgcagctgaggacgctccttttcttcaatgggttttccccagataatccccgcaatatcattggccagcatggtctggatattttctatggtatcctcctggctttcctcccccagcacatgacacaaaaggagatagcctctgctttgaatctcccggtcaatggccataaaaagtgctgagatatggggattggtcagatcattgatgatcacccccaccttctggctccttctggtggccaggctcacggccgcctgattgggctgataatgaagccttttggctgtttccctcaccagctccctggttttttgtgatatgcggctgggcctgtctgacaaggccatggaaactgctgccggggaaatcccacattccctggcaatgtccttaattgtgactttcacgtatctaccccctgtatccggtttctagatactattttaacccataatttctatttatgcaacgaaaccccggcttttcccttcatggacaagggcacggctgccagcacagccagagccaggaatgtgctgatgagacggtctccataatcggtgaccacctgtaccaaaaacacagaggctgtcatgggcagacccaggtgcgagaaaagctgtaccagcagggaggaaccagaggaggtgatgcctccaaataccactgcggtgatcacagagctggctgcagttcccggaaggcttagagccaatactcccccgggaaggctttttttcttaagccatccttttttgctgaccaggccggccatggctccggtgatcatggcgctgggaataaagtaaaaggatacggcgtcaaaggtgattccgttcagcatacctgaggccgcccctgccgccatcccatacacagggccgtacaaaaaggctgccgtcagggtgccgatgctgtccaggtaaatgggcaggcgaagggccagtgcaagcattcctcccacaaaatttaaagctacacagattcctaatatgcacatttgtgccactgttaattttttcatatcctgtctcctcataaaatctgttccaaagtgtgtgaaagttccggttcttgtgcatttatgatccggctcaggaaaaacttcatgaagcccagggaatctacctgggtgaggatatggctgtttggggcttttcggtaaaagttcatggcatccaccaagctctgccccacactgagtccttgggtttccactctggtataggcgtcaaagccaacgcacagacttggatccaggaaataggccacagccagagggtcgttgatgacacagccaatgaccctttcctgcttccagtggaaatcaaaatagaatcttgtgatttttctgataaactccccctcctggggacatacctgggaaatgtattccagaatatttggcgtcagcacgatctttcttgtcacatccagtcccaccatgtgaattttcacaggcagatgggaaaatacataatccgcactgtccgggtcgcaccagaaattatactctgcaaccggagaacagtttccatggcttttgtagcttcctcccatgcacaccagcggttctgcatgtgtgaaagcctccggatccttcttcagggcatccgccacattggtaaggggccccagggcaatgatggatacttgtttttcctttctcagggcttccgaaagaaagtcagaagcaccttcctggtaattcattgatgtaactgggggaaatccggactctcccaggccgtccatgccgtgggtgtcctgagcgctgacgtactcttttttccagggggctcttgcccctgcgtagacaggaatgtcccttcgaccgtaccggtccagaatgcgctgtacattttgcacgcccagttctgtgggaacattgccgcagaccactgtgatccccagtatttccagctccggtgactttaaggccagcatcagggccaaggtgtcgtcaatgcctgggtcacagtcaataatgactttgcgtttcgcattcattctccaatctccttttttcttgagatacttagttttttatcctgggaagttgtcgaaccagtccagggcactgccctgattttataaatgcacgccatttattataattactttttttgaaaaagtccagaaaattatatatattttgaaatcccgcaattttgtcagcgcagttttgtatccttttggcgggtacgcagaagtacaaggcagcagaaaagcctgccctttggaccagggaactgtagaatattgctgctgttccttgggtcttcaggcaggcttatggactatttcatttcaagtacagtaaactcatattgccccagaaggatctctgtgtctctgatctcactcttggatttgttagagagaaggatcttctttacggctccctcaaggggtaccagccgttcctccttctggaaattggccagcaccagcagattggggcttccttttctgtagaaggcgatcagattcgattcctcctccagatagggcacaaattctccatatacaatggtctccttatagatggggttcttgcgaagagcgatcagctttttataaaaagtaaggacggagtctgggttattctgctgtcccttcacatggatcctggtatatgacgggtttaccctcagccaaggtgtacctgtggtaaagcccgcatttggtccgtcatcccactgcatgggagttctggcattatccctggagaaatgggacacggcctccaaagcctcttgtggggaaagtccggcgtgcagggccacctggtattcatcctgagtacttacatcatccacttcctggatggaggcaaattgtgtattttccataccaatctcctgcccctggtaaataaagggcagacccctgagcatgaaattgactcctcccagcagcttcttggaatcctcacacagatcctggggcagaatataatggctgacccctctgggttcatcatggttttcaataatattggagatcatgcctatatcgccgatcctcttctgggttttaaagcagcactgtctgtactcatcgggtgtgaggtatggcttacagtcataccagcccttttcgctttttccaaagcaggtctcttcaaaatcaaacatggtggaaaaatagccgtcccctccgataaatgcttcaatctcactgtccttctcgttaaacacctctcccaccgaaaatgcattgtggggccggaaggtttccctggccatctctcccagaaattcccccacgccctgggcttcctccagcatataatggatatcgctaaggccgtcatcacggtctgtgggataatccttaaaaggaagctttttcttaatattgataatggcatctatgcggaagccgcccagtcccttgtccagccaccagttgatgtttttgtacacctctgtccgcacctttggattttcccagtttaaatccggctgctttttatgaaacaaatgcagatactgcttctggggatttccagggaaaggctcccacacagagccgccaaaatagcttctccagttacaaggctgctttccttcctgggcatcctggatgtaaaagaaatttccatattctcccacagggtcccggacagcctcctggaaccactggtgctcatctgagcaatggttcaccaccaaatccatcaaaatatacatgtcacgctttttggcctcactaatgagacggtccatgtcttccatggttccaaagcgagggtcaatgctataataatccgcaatgtcatacccctgatctgccaaaggggatttgtaaataggggacagccatacaatgtccacccccaagtcctttaaataatccagcttgctgatgatccccggcaggtcgccaatcccatctgcgttggaatcataaaagctcttggggtatatttgatatgcaaccttgtcatgccaccattcttttttcatgtccttgctccttttctctggtgcgtgtttaaaaaccacctttggaaaggtgtgcgtcatccttgggaaggaatcttcaaacacgctctgcgttctatatttgcattatagtgacctgagcaaggtttgtctttcattatttccatctgttttttaactatttctaccaaaaccagtaccatgtttaaaatttctattttgtgcacacagggaccggtgttattgttcaaagcctttgttgttctgttccttaaaataggcagcaggtgtctggcccttatacagtttaaagtacttataatagtttttcagattggcatatcccaccttctccgacgcctcctgaaggctcatgtgcttttccttcacaaactcaatggatttttccacccggaccatatggacataggaaatgatggtcatactcatatgctttttgaaaagcctggtaatatagctctgggtgctgaaggtgagcctggcaagctggggcagctcaattttctcattatagtgggaattgatgtactcaatgatggcgttcactctctcatttggagtcacattccatccgatggcccggtaaatggcctgctccagctgttcaaagtcaatgggcttggcaatgatatcgcacacccctgcccgcagggccctctgggcgtattcaaaggaatcataggcagtgacaatgatcaccttacagtcccggatgttctggatcacctggaatccgtccatatagggcatgtggatgtccataaacaccaggtttggattggtccgttttataagagagagggcttcccggccgtttaccgccgttcccacgatctccagaggaaaattcttggactcaatatagtaccggataatatttacggtggcctcctcatcgtcgcagatcacagtttttatcacacaaaacgctccttctcaggaataaactctggggattctttttcctaagtcacaggcaaactcatagttgaatctgccgcttaaatctcccatttcctccattgttatggtttctgtaccgtcagtgccgatcaatgtgaccaaatccccggtcttcaccccaggaatagaactcacatccaccatgaactgatccatacatactctccccagtatacctgctttttgtccatgaatcaacacatatcctttattggacagggaacggggatacccgtcaccataacccacagggatggtggcgatccttacctttgtgtctgccacataggtacctccgtagctcacaggcgttcccggcccaatgtcctttacgtgcaccacatggctggtaagggtgagggcaggtttcagccggatcttttcctgatgtacctcatgggagggcagcagtccgtagaggataatgcccgcacgcaccagatccatgtttgcctgtggcaggttcatgatccccgcactgttggagcagtgtttgagaggaatggaaattcctgcttcctccaaaagtgtgacaaatctgaggtacttttccatctggtttattgccggagccgggtcccactcatccgctctggcaaaatgggtgaacattcctccaatctccagtccgggcatgtgggatatcttcaggcagtccggcacaaaggaggggccgtccgaaaatccaattctgctcatccccgtatccacggcaaggtgaatgaccatcttttttcccagcttctgagctgtccgggacagcttctcggccatctctgtctgaaacactgtggggatcagatccagcctgcacatgacctcataatgctcttcaaaagtataccccaaaatctagatgggcttttgtatccctgcttcccgaagggctgtcccttcctccactgtggcgcaggcaaagccccaaatatagggaaggtcttccactctgcgggcaatgggaaccgcaccatgtccgtatccgtctgccttgatcactgccataattttcgtattttctgatacattggcatggatctgttccagattccacaccactgcctctaaatccacatacgcacagaccctgctgtgcatgttttctttttctgtcattgccctgctcccttccttgtcatttgggtattttcacataaaagatggtcctgtcatccctggaatagatcttcatagaaaagctggacccatacagagcttccagcttatggtacaccattcccagaccatggtccgtggcccccttcatccctgcgttgatccatctgcacgcctgctctgtgaccggttttccccggttgatgatcttaatgtccacatgctctttcctgtcccgtacctgaagctccatatattttctctgctcctgttcacagccgtggacaaaggcattttccaccaggggctgaagaaaattgaagggcacaatggtgtcctgggccttttcatcaatgtcaaaatagaattccagagcatttttataccggaatttctgaagctggagataggactccacataggtgatctcattttttaaggccaccaggcttccctgggtctgagaagaataatggaacattctggccagatggatgatggactggtacagagtaagcccgccgccctccagggccagggatgccatctgattcaaggtgttgaaaagaaaatggtggttgatcttcagatccgccacggtactctctgccattttcaggttgtgaaggagtatttccctggaatttttactgtcctccaaaagggcctctttttcaaacagggcctttctgtactgattaaattcgcagaaggtgcggattgccctggatgccttgcgcaaaagactcttcaggccctctgccgtgctctctggggtgtcatagactccctgaatgggtgtctcgttttccttggagacccggatatagccccccaggatgtagccgatgacctttttattaaagaagatgggaatccggtagatcaaaagcccgtagggacattccatggtcccctctgccgtgtccacatactgggtgctgtttttcatacagaagcactctcccggctccttcagcgggtggcagatgcggtggcagtaattgggaaaatagcctccctggtacagcagttctccgtctgtggaaaaaatagagtaggcagagtggagattgtcaagaaactgtcttctcacagcttcaatggcggccaagagatcctgtgtggtgatctcctggtaggtctcctccttgtcaataaagctgtccatttccacctgcaccgcattggacaccagaagatggataatgggaccgtctccaaagtttttcatggaatgctcacagccgcactccataaaatacatggctccaggccggatttcttgttttttcccattcatgtacccaatgccgaagccctccagcacgtagataaactgctcttcataatgtatatgggggtacatttcctttcccggatagcataccaccttgccgatgttcatggcaggctgtttctcgggcttatggatccactcaatgtatccccagtcggttttctgtatattcatcccctcacctccgctctctgccgcaaggaaatccccgccgcttattcccgcgctgcctacatgtgggagacttccttgataaggtcagtatgtatagaaaaagcgccgcataagaaaattcatcctgctgcggcgcttttgtcctttgcccccgttccctgaagcacaaacaaactgtcatgcttttgggaaaaagtgcacattcttttcagtttttaatagctatatttaatcgtcaaacgctccggcctgatacagggggaatttggaaataagcgcttctgccctttccttgcaggcagccaggttggcttcatccgtaggcgcctgggcaacttggttcatgatacttgcgatctcgacaatctccggctccttcagtccacgctgggtcacagaggtaaggccgatacgcacaccgctggttactgagggtttctctggatcaaaggggatcatatttttgttaacagtaattcccactgcatccagagcatcctggaaaacggttcccgtgattccctttcctcttaagtcaaccaccagaagatgattgtctgtgccgccgctgacaatacggaaaccatagctggtgagctcttctgccagttttcttgcatttaccactacctgagccatgatctggcggaattcttcagtggctgcatatttaaaggaccaagtctttgctgccatggtgtggaacataagggatcccaggcttcccgggaaggtgcctttatccaggattttagcatatttctctttgcagaataccataccgcttctggcgctgcagaaggtcttggtggtggaagaggttacaaaatctgcgtaggggatggggctgggaatcacctttgctgccacaagtccggcaatgtgggccatatccaccataaagtatgcgcctacttcttctgcggttttagcaattctctcataatcaatgagtcttggataggagctggctcctgcaatgatcattttgggtttttcttcttttgccagcttatcaagggcatcatagtcgattcgctctgtctctttatctaccccataaaatacgtgcgtataaatcttacttacccagttggccggtgaaccatgggtgagatggccgccctggtccagacgcatggccagaatcttatctcctggattgagcacagaggcaaatacactgtaattggcagtggaaccagagtaggactgaatgttcacatgctcggccccaaagagctcttttgctctctcccatgccaggcgctctaccttatcagcaacctctgagcctgcctggaatcttcttcccggatatccctccagggtcttattggtaaatacacttccgcttaattccataacctccagaggagctgtactctcagaagcgatcatttcaatattgtgttcctggcgtcttaactcctcatccaccagtgcggcgatctcggggtctgactgtcttgtaaattttaacatatcctgtcctccataaatttataattttatttgaaatatttatgattcctattttttgcctgcctcacgttttttcagcatattggcatatttatcccaggcccctgtctcatccttgatcccgaatttcgccggatcaaagaggggatccacacccgccttcttttgtgcatcgtaatccttcaaaattgcacggaccttcatagacaggaataaaataccgatgatatttgcccaggccatcaaacctacgcctaaatcagccatgctccagattgtctggccgtccacgatcacgccagagaagactgccagcaggaagatggcgcgcatcaaataagtgcctacaggtttacccttgaagatgaacttcatgttactctctgcctgatagtaatagcccatgagactggtgaatacgaacagtgcgatcataatagccagcagcttgccgccccagccgcccagggactggttcactgcatcctgtgcccagagagcgccatactcacttgcggtattgttgacgataaaattgcctgccttgtcaactacgttgtaatttcccgttaccatgatgatcataacagaagcggtacatacaacgatggtatcaatgtatacagacagtgcctggatcaggccctgctttgcaggatgggaacactcggctgccgcagatacaatagcgccggagccctggcctgcttcgttggaataaacccctcgcttcacaccccaggatactgctgcaccaaaaatgcctgcaaacatggaatttcctgcaaatgcggagcttacgatggttcccagaacgccaggaagttccgtgatgttcattccaatgatgataattgccatgataatataaaccacacacataacaggagccaaaagctctgccacatgaccaatacgtttgatgccgccccatacaacaacggcaatagcgatcacacacacaacgcccactaccatctgaggagtattaaaggcgctcttaaaggtagatgcgatctggtaaatctgaaggcccggcattaaggttccaggtcctaacacggctgcaatagcaaaaagcattgccagcacttttgctaacggcttaattttaaatccctttgtgatgaacagctgggcaccgccaatgtattcagtgccgactttgtccttgtaggcctgggccagtgtacattctgcaaaggaggacgctgcgccgatcagggcgatcagccacatccagaagattgctcccgggccgccgaaatacaaagcggtagccacgccggcgatatttcccattccaacacgggaacctaccgttgttgcaaaggactggaaagcggaaatacctttgcccttttcctctccctccagctctgcctttgaccggttgcggaccagcttaaacatgtccttgatcaggcggaactgacagcctcttgtaagaaatgtaaaaaagattcctgcgccgaggcacagcagtactaagggcagactccatacccaatcattgatctgcgtgacaacttttacaaaagtatccatatactacctccttctccctgtgttctgtaagcttttttattcaatgagtttcttcgggtctttgtaagcaagaccgaagctgtccgccaagttcttacaggtgatctcacctgcgtaggtgtttatagaagaataaaagacttcattctttctgcatgcttcctccagaccctttgccgcaatgtccagcccatatctcagggtggcattggtaagggcgatggtggaggttctgggaaccgcacccggcatattgcccacacaataatgaaccactttgtcaaccacaaaggtgggattgtcgtgataggtaaccttggtagtctcacagcaccctccctggtctacagccacatccacgatcacgctgccagggcgcatctttttcagatacttttctttgatcagctttggggctgcttttccagggatcaataccgctccgatgaccagatctgcctgggccagggcagtttctatggatgcatcggtgctcatgagcgtctggatcctggcgccgaaaatatcgtccagataggccagtcttgccacattaatgtccataatggtcacattggctcccatgcccactgcgatcttacaggcattggttcccacgcttcctgctcccagaatgacaacatttgccctgggggtacctggcacaccggataaaagcactccggagccgccgaagggtttttccagatatttggctccctcctggacactgagtcttcctgcgatctgactcatgggcgcaagcaggggaatgcttccgtctctttcaatcaaggtttcataggctactcccttcactccggtattgagcatagcgtccatgagaggacggtccgctgccagatgcaggtatgtatagaggatcaggtccttgtgaaaatacgggtactcttcttctaagggttccttcaccttgatcatcatttccaccgcgtcccatacctctttggctgtgtcaagaatgatcgcccccgccgcggcatattcgtccgtaccgaatccggaccccactccggcgtctctctcaatgtacacctggtgtccggctgctacatagcttttaacattgtcaggcgtcatgcccacacgatattcattgttcttaatctccttgacacatcctactctcattgcagaacctccttttctttaagctgacgtttattgaatttttataaagcttttatgatatttatattatcgcaagatttgattccaaaacctatccctgatatggtcattttttttaccaattttacactatttgactattattgcgattatatacaatattccaaaatcagtcagttttttaactaatactctgtgaacttatttatcttaaatcctggccgaatttttgctataatacaagcatgacatgcaggtaaaaaaatgtggcttctcatacttctatgaaaaaacataaacttagcacctgtaaatgggaaaaggggaacggtacaatgaacgaatcatccagacatctgcgagaaagaaaagaacggggaagctatctgtatccctttcagatctattcctccaattatcaagggaacgtgagtcctttgaaaaaacagcatacctttgtatcccaccactggcatccggagctggagatcatctttttgtttcagggcagcctgacggttcttatggattccagaaaatattccggaaaggatggggatatttttttcatccacccagggactatccatgctctcatctgtccggcagatgcctgtgtgacctatcaggccatggtctttcccctggattttctcagtttctctgcctatgattatgtacagagccattatatcagccctgtacagacggatcagctgctcttccctccccagatctgtcagggggatcctgcataccaggaaaccgcctgggtcataaaacagattctccgggaaaacagcctgtgcgcttccggttatcagtttcagacaaagctgagcctgttatctttattgtatgtaatgcaccagaaaaaacttttcatacaaaaaaaggactcctcccacagccagaccggcctgcaaaaggatatcctttcttatatagaagctcattacaccagcaagatttccctggagcagatttccctgcatttccatctgtctcccaaatacttcagccgctttttcaaaaaacagtttggcaaaaccttcacggaatacctgaacaccttccgcattgagcggtcccggatcctgctgtctgacacagaccgaagcattgcggatatcgccatggctgccggttttgaaagtgtaagctattttaccagagtgtttaaagactccctgggggtgactccgggcatgtaccgcaagggaaagcacaatgaacgggaaattgcctttagtgctcaaaaagatgtgtatatatagacctccgtgtgccagtgtgttaaaaactccgtgtaacaacagccgcaccgctttggggaaccaaaaggcagaacagcccctgctccatggtccttatttccgaatgcacaacgtctcccatacagtcatacacagtaacctgatacacctctccttttcccgggctgtccacatacagccggtcgtgacaggagccgttcacaaataccatctcctggtaaagttcctttagcaggatgacctctccagaatgacaggtcaccgccaattggtctttccaggctcccatgatcacagagtagccctgtatgggattcaatggcgcaaagctgccttttacaaatgcgttctggtattttttccataagccgcagtaaaaagccagcaccttctcatgctccggggacagtgtctcaagcctgagggaaatctggggaacgctgaataagatctggatgagctgcagggcagcgctctttgggctgtcttctggatgccacatgagcatatcactgtgtacggcgctgtttcccgccaaaaggcggagatcggtgactctccggtgattttccacatcgtcaaagggacagtccaccgcccggaagatatttccatagcttctcataagggggccgttgtaggtctggcgaaattccaggagaatgtccggtttcttctccttcaggcgccggatgcactccttcatcaggtaatccgctgcctggacaaaggacagaaaatctcttctcttatcaaccggtgtgccggaaaaaggcgtcaccacaaattcatcgacaaaatccagcttaaagccatccaggtcatactcctccaaggcagcttcgtaggtctggatgatgaactcccgcacctgaggaaaccggggatccagcacgtgccattcccggtcacttttaggatcaatgagcatatcctggtatctgctgaaattctgcgatttttctccgataaaaggcacactgtaccaggccatcaccttcattcccagttcatggaccttttctacaaagcctctcatgtccggaattttgccgggcgcaggcttccagtccccacagaaggcatagcctctgtgattgtcatcggtctgccacccgtcatccagaagaagggttttcaggcccagcttccggcacctgcggcactgttccaaaagcgcctcctgggtcacattctgatggaagctgtaccaggtggagtacatgggctccatagccgcctgggggaccggggcaggggaatttctctcatccttctcccaccaggaagctatctgggagaggctctgataatagggcacccgccttgtgtccagacgcaggataagatcatatgtctgctccaggtattcctgttcaaacagcccaacctcaaatgcatattccccggtttcctccaccgggcaggcaaagagacaaatggtatgcagggtatcggaaagagccaggcaggccctgttctcattgtcatttcccatgagacataccactggtgctccggtaaatccgctgtttttcttaagactgagaaaccagtccagattcagggcctttattaaatgtatcttgggcgtccacagataatgaatgtcccaggcaggcaccaggacctttattgtcatgggatgaaatttctctgcctttgtgcgctccatatggatgtgaatttccatgatcccatcctgctcttttttttgggcgcagatgaaaatcccaggaaccttgggcagctccaatttataattgtccaacatttttctcagtcctttctgctgtctttttcatttgggctgccggtgacttctgtgttccggcagcctgtatcagtcttcaaactctgtgatccggtccatcattctcctgtaacggaacctggccatttcatttttttccagcacatctgcctcgcttcctgtgtactggcaccggatgcaatagtattcgtccttctccttgtcataaaacatatcgatgtctaaatccctcataaaacaggaaggacagcggtaatttaatctgccttttccaccttgagccatgagcacaatacctccttatttttcatagtcttcttaagtccaagggtatacatgggtgaaaatgcatacccctcctttacatacgcggtcacctcctggtctgctcctacagtggcttttgtctgaatctggggaatcaccacctgggcaaaatatgcattttccaccgaggcttctctgcatttataggcgtattccagtacttcttctctgttactggagcagcaccgaagggtgatcccccgcatatcctccgggtattcggttgtgccgtagcagcctgtaaaatattcctgaacctcgatctcagcctggggatcgctcatgtctaaaatgtgccgctctattaggatcaaggagctgccttccgggaatttaaagacagtctgcagcttcactgtcagcccctgaaactcaatttccacgggatccagggtaagaactcttgtatctccttcttcatgaaaatgtgcttttgtcctgcacagacacagatctacttcctcctggttgtacaccagcttacagcttttgatagtaccttctcctgcatagtgggtgaaatatccggctctgtatttttcctggatcaagaagggataggaggcatcctgcacatgctttgtgccaatgcccacctcccattttattttcgctgcatagggacgcagatccaccagggctcccccctgattcatgtctacacaggttctcagataagggtccacataccagaacagctgcttgtccgagccatacaaaatatctcgccacagagcacattccggctgggtataggtcttgtttgccctgtaaaaatctgcaaactctgccatagtcatatcctccagctctccttcgtctctcagcttggcatagtaggccattccgtcctggtaactcttcaaaagaagctcatagggagcttcccatcggcccattttgttcatccatccagggcccacaaacatcatattgtaggcataaccccggttgtattttttcaaatggcggtactggtcaataaggttgtacagatagggatattgcccatcccggtagatcattccccgcagcacattctggggatgagtcccgaaattcgagccgttaccgtcaaagcaggcaatcaaatctctggaaagatgagggatggccacgatcctggaatcctgttcttcattttctgccggggcatgggtattttccttagagggaatccaaggattccaggggcctccgtcgaagagggtataccaggaattgttgcaggtgtgataggccttggggccctcctcccagcaggtggcaacggcgcattttacagaaggatattgttcctttatataattgatcagctctgcgtccatgtaataggagccggtggattctggataaaagccgaatttttcataaaatttttcaaaaacatcctggacaatggccttcttgtcttccatggaaaacatccagatacagaagtcctttgtcttatatttttcccggaactgctcgcagggaagtcccagaagagtcaagccgatctcgtctccatacttctcgtgatggtccttggcaagagccactgcctcttcattaaacaggctggcataggtcatctgaatggtggtgcgaaagccgtttttatgggcgatctcctgctgggtcttgaaaatatccagggattctgtgagaagcgtttcctcccctaaatcctcctcttttccatgtcccgtcaccttctgggaatattccgggaccatctccggccggtgaatgatatttaaaataaatttgtccataaaggttcctctcttttcatctctatcagtttttatttctagcttttcactgctccggcgatcatgccgtccacaatgtatttctgggcaaagcaatatacaagcagtatgggaagtatggacagcacaataaaggcgcacacataattccacttataggtcatataccccacaaagctgtaaatactcaagggcactgtatttttcatagtgtctgtaatgaagtacaaagatacctggaaatcattccaaacacccatgaacacaatgatcacatttgtaaaaatagcaggcttcagcaggggaaataccacctggaaaaacatccggaagaagccacagccctccagcatggcagattcatccagggagttggggatcccctttatcaccccggaataaatcataatactcaggggcatcctggaggccacatggataaggataacggacagataggtgccgctcagtcccagggttttcacaatgatcacctcagggatcagggacaaaggcgcgatcattccaattagaaaataattggataggatcctgctgagccggtcatgtcttctggtgaggataaaggctgtcacagaggagatgagcacggtgagcaccaccactgaaatggtgatgatcaaactgtttttaaaggccctgatgagattcccctgctccaccacataggaaaagttctcccacagaaaattcttgggcagagtcaagtccacaatggccgcctcatccacagatttaaaggacgtaaggatcaccaggtagaaaggaaaaagtacggcaaaggtcatgatcccgcagatgagatacagacctgtctttgagaaaagcttcttggttttataattcatcaaatatcaggctcctttctcctgaggaaattcagcaggggtgagatcacgatcacgatgagcaggaactggatcaggttaatggcagatgcataccccagcgttcccaccctcatggcgtcataggacagcttgctgatcacctgggtggccccattgggtcctccgtttgtcatggacatgacaatatcaaaaatattgaagcctccgatgacacacagtgtgatggtggtatttatggaaggcacaaccagaggcagggttataaaccgggtggtctgccatgcactggccccgtcaatccgggcagcctcatacacatctgaggaaatggactggagcccggccaggataatggctgtgttaaatccgatccacatccaggattccacagcacagactgtgtaaatggcaatgtccggatttcccagccagtttaaggccagggcatccagacccacagcccggagtgcttcatttagaattcctgtatctggctgaaggataaaggtaaatacatagccaatcaccagggcaccgatggtacagggcagaaagatcactgcccggaaaaagtttcttcccttgaaggcccggttcagaagcagtgcgaagatcactgcgatccccaccttcaagatcgtagtcacaatggcaaacaaaaaggtatttcccagggctggaccaaagctgatggaagaaaacaaatccttaaaattctccagaccgataaagcccggagactcaaaattatagatactccaatctgtaaaagaaaataaaaagcctcctacaatggagcaaatatagaaaatagtaaaaataacaattcctggaatggcaaagtacagaggataatactttcgttccagcctgccggttctatgctttttcacaactttcctcctcttcttttaaaaagccaccaacgctccacgctggtggctgatcctgtgtgtcagttacagttttttatttaaatccgtcaaagccaagctgcttgcctgtggtaactaccgcatcgctccagatctttgcacattcttccggctctctctgtcccagaagtacagacagaaacgcactgttagcttcgtcagaaggagtgatcacgtaggtctggttgtaatgaatctctgtatttcctgcatcaatataagcctgggtatcctttaaggtttcacttaaattcacggcctcaatgtctttccatacggaggtgcaggctcttgtctcaagattcagcttgatgttgtcttcttcagccataaagcttaagaaatccttggcagcatccacatttttactctgattggaaatatagtagccccccggtcccgcaatggccagcttgctgtttccgtccttggagggagctgcgaacataccgatggttcctgcatcctctggggccactttggcaaattccgggtctgcccagtcacccatgtacatcatggcagcttctcctgtggcaacggctttttgtcccatctcatattttgcggtggacatatctgtattaatatatcctttgtctacatattcttttaatcttacaaacatttcattaaattcaggaatggcatcccagcgctcttcattggcattgagtttttccagacagtctgggttggctcccagaatgttggcccactctgcattcatgatctgatttacggtccaggcatctgccatggatacatagatgggcgtgatgcctgcttccttcagggtatcgcacacagcgttgaattcttcaaaactcttgggcacttccagtccgttttccttaaatacatccttgttgtagacaatcccaaaggaatttacacctccgttggggaagcagtagatttttccgtctgtgtgggtgacgaattcttttcctgtgtcagtgagtttttccacccatgcttcgccggacaggtccaccagattcttctcatgctgatatgaagtggactgtgttcccgtatcgccgatgaaaatatcccacatgccgctggtggacattttggtctgaagaagggaatcaaactggttgtcgtcaatggcctgaacatccaccttgtttcctgttttttcttcccaggctgccttgtaggtctcaatgtttgagatttccacatgagaagccttcattcctaccgtgatggtggttccctctgcccgtacttctgcggctcctgcaaatgcggttcctgatacagccattgctgccgcaagtcctgccgctgcgattttcttggataatttgttgaatttcataactttcctccttttgattttgttttttctgtaattttcatactcacattctacatagttaggcatttaaagagaatgtcttttttttatttcctttttgtaattttttgacatcaggttgtaaaagcttattttctatggcatagtaaggataacaatttatcatgtaggagatttctttatgaaaacacatgcttttcgtaattcacatgttaaaaccagactttttgtgggcatcagtatccttctcaccaccctggcccttgtggtgtcgctgctcttttcctttacctccatccgcagcaccatgggtacagagaagctttcttcccaaagtctgttagagcggatcaccacccagatcaatactttgtatgagcagatgaatattgccgcaacctccatcaccaagaactctacattaaagaatattgtcattgacttaaataccatggatccctcagagaccatggaatatatgagccgcctggaacaggaacgggccatacaaaagatcctgggaaacatgatgttttcccccattatttccaatgtgatcctgtactgtacacagccagaatacttctattataccggcacttacttaaatgacaccgcacacattgaggcagttcttcaccaggatgacacggcccggatcttcaaggacaagacagttatttaccgggggccctcccagaatccctggctcacctcccagcagactgtactgagcgtacagcggaacttttccgataattccaccacggaaaataccattgtatccatccaggttccttattcccaccttgacgaaatctgcacccagaattccttccagggcgaaaaagagattcttcttctggatgaacagggcactgtgatctacccggaaaatccccggtatgctcttctggaaaagagtgagtacgccgccatcttaaagaatataaaggatgggaaagcaatggagcataaatacgcatactcctatgtctcctcctccaacggggaccttggctttaccaccgtgctgctgtgtaacaatgcctccatgcacaggcagatgcgcacctacatccaaagcacggtccttgttgtcctggccgcactgatcatcaccctggccgtggttttctgtattctgactctgatcaccaagcccctaaaccagctcatccagtctgtggatctgctcagtcaggacagcgaatccaagcttcagatccccaaggattccctggatgaatttaaaattctgcgctcctccctggaccagatggtgaagaatctaaagaactctctccaggaaaactatgagcttcagatccgggagagcaatgcctccctggctgccctgcaggcccagatcgacccccattttctctataatgcactgaacagcatcagcgctgcaagtgaaatttatggaagcgagatgaccaccaccatgtgccaggaattttcttccatgatgcgctatgtgacctcctccaagcagacggtcacactcattgaggagctgcgccatacagagaattacctgaactttatgaagctttccaacgaggacaatttctcctatgagattcacactgacccggctctttacagtctgccagtgcccaaaatgtctatccagcccctggtggaaaacagctttaagcacggctttaaatccactctgcctccctggcacatttccattcactgccggatgggacaggaaaaatactgggagattgccatcacagacaatggctgcggctttgaaaaagaggcattggagcaggtgacaaagcttcctctcaccttccaggatcaaaagatcaatggccttgggctgaacaacaccttttcaagaatgtccattctctatcagggacaatttgaatatcacatagagaatctttccaagggatgcgaaatcgtattaaaaggagtactttttgatgttgaagatcattgtagctgaagaccaaatgctcattcaaaaagacatttgcagaaaaattgaaaaaactgaaaaagaggtggaaatcgtggcaactgccatcaacggccaggatgcctatgaaaaaattctccaattccgcccagaccttttgatcactgatatccgtatgcccatccagtcaggcctggagctgatccgccgcctccggcaggaaaaaatccccatagccactgtcctgctaagcggctatcgggattttgaatatgccaaagaggccatgaagttgaatgtggacgaatatttattaaagcctgtgagcacggaggatctctattatgtgctggactccctggaggagacactttttgcccaaaaagaccagatgatcaaggaagccttaaatgatcttctcaacgccaggacgccccgtgcccctatggagaatctgaaggatttcacttactcctcctattatgtggtgcttgtgaacctggattctctgtgcacattttccattatagatactctgccctatgaggaccagttgaaccagctcctgggcagccggctcttgaacagttatttggctccccgggagcaatattttgtctttgacggaaaaacctataatgaaaaaattcttttattctgcctgaataccaccacacagaaaaagctgctccttgcccttaagcagcttcaaaagcagatagagaccatcactgcctgtgtgaccttgtgcgtcagctcctgccttttagacctttcctgtgtgggcatggaatgccggatcctgcgcacccagatgcagcagcagcttgtgtttggaaaatcctccattctgtacggaaaggattttctctcccaagaggagcactctcacccttgcgcacttaccgatgaacagttggaaaaatttcgattttatatacaagtgcaaaatttcagtggctttttaaaagagctccatacctttcttgggcagtgccaaacctggaatatcacccaaaaggagctgagccttcatatcaagaaagtcctggaatactgctgtccctccttttcccataagaccctggggaacttaggtctggaaattgacgaatacatctccaacggaaaaacctatgaggagctgtatttatccctcacctttatgtttgaacaagcacttaaaaagctcactcaggacagccggacctttccagagcctgagaaactggtggaggatattaaaaaatatatccgtacgaatttcaacagggagatcaatattaatgacattgcggtgcatttctccatcacccctgcttacttaagccggctctttaaaaaatattctgacatcaggccaatcgactatctgacaaactgccggattgagcaggcctgccactactttatccactcccagctctctgtaaaggaaatcgcccagctgtgcggatactccaaccagtattatttcagcaaggcctttaagcaggagacttccctgtctcccacagaataccggatcaaataccagaacacacaggaatgatcagggttgcgttgtcacttcaggctgtttctgctcctccctgggcaggacagctttttttcttgtaaggagaaaaccgctggtaagagctgtgaagggagccactgtcaccagtccgaagctgcccacaatggtgtccaggatctctgcggacacatatttataattcaaaatattgtcaatgggagttccctgggccataaaggtcatgagcagggcaatgtagcctccggaataggccagaagcaaggtggtagtcatggttcccatggccgcacggcccacattcatcccggaacgggccgcctcctgccatcccatatctggtttcttagatatcacctcctgaacggcggaggtaatgtccacagccagatccatcatggctccggaagccccgataaagatgccgctcatgaaaatttccgtaagattcagattctggtagcctgcatacagaagactctcggaataagccataacagctccatggatcttgaaggcattggtaaagatacagccaatgatgcaggtcacagccacccccagcaaggctccgctgctggcagccattgtctttgtatcccagccatacaccaggaaaatgatcagcacggtgagaaacagggtgagcaaaagtccgcaccagatgggattcaccccttttaaataggctggcaccatgatcttccagatggccagcaccgtgatcacaaaggagtacacggcccgcagccctgtctttcccgcaaagaccaccagaagaagtacaaataagcctgccagaagcatctccttgtcaagccggaaatggtctgtcatgatcacagaatttatttccttgtctttataactgatgacaatctgggccacatcccctttttgataaatcttatctgactccagggacccgctgagcatattcgtggctttggtctcctgacctttaaattttccttccaggattttcaccctgcagtactgctccccagactggatgagcccggagcttttcaccgtactttcatctgtttccaacacctgtgcccggacccggtctgtcccctgataaatgagggcatcctcatagcctgttggaaccgctatgaggatggcaattataagaagggacaacactgtcacgctcagctgtctgattcttcctgtcatttattgtactcctgtaagagaagccattttgtcaaatatctctgtattgtcatagtagccctggaacaattcctgtccctggcccattgcaaacacctccacaggcaggccggtgtgggcataggaagagaagctgatgccggatttgttgttgaggatgtgggtgatggtaacggtcagtggttcgtagcttccatagagaagatattcttcctgaccaaatcccctctttactcctgtgcggcttatggtggtctcataggctgcctttagcttgttgtattcataatcagtcatcacaaggcttccggtatcctctgattctggatggacgtccttactgtccgcctgggcggctacttcttcctgtccgttgggagcctgaagaccgaacagctctgtgatatccttcatgacatcttcaaaggcagtcttgttttctttgtaggatgccacataatcagaatcaaattttgcataggatattttctggctgtctaaattggtgaggaaggtatcataatcagtacctgcaaagccaacggatagacctccggtctcgtggtctcccgtaaccagaataagggtttcctggggatgctccttgtaaaattccacggctctgcccacagcctcatccagggcaagggtgtcatgaatggccgcggcagcatcattggcatggcaggcccagtcaatcttgcccccttccaccatcatgaaaaagccgttgtcattgtccagaacctcaatgcccttttccacataatctgcaaggccccattcgttctcttctagatccatggcatagctcatggcatcatcgtcagccaaggtctcatcaatgagaatggctttcccggaatccttggtgagggcttctgcctgatccttcgtctcaatcacctggtagcctgcctccttggccagctcatacagatcctccttgtccccctcatccccagtggatttttttagtccgcctcctgcaaaatagtcaaagccgctgtcaatgagctcctgtccgatctcataatagctgtttctggatgcctgatgggcataaaaggcagccggggtggcatggttgagatttacggtggaaaggatgcccaccttataatccttttgatctttcaatttttccgcgattgtctcataagagatggtctgagtttcgtccatgttgatggtgccgctgtaggtcttatgtccggtggaaatggatgtggccgcggatgcagaatcgggacagaaggatgtgctgtcataggtctgtgcggaccctgccacaggaaaatccatcatatgcagattattctggctggtgagaacctcgtccttgtcatctgccagggcgctcaggtaataattcgctgattgaatctggggatagctcataccatcgccgataaacagaaaaatatacttgggtatagcgctgtctgtctggacctcctgcgtattttccgctgccatagccatctgtgccggcgccaaagtccccgggatcagaacacctgccgcaagtaatgctgctgccatttttttcactttcataatcaatctcctcttcttgtgtcatagattttctttcttttttcaacttacagggctattatatcaagggattataaaatgtaaatcgggtggagattaaatgtaagttaaacattttcaaaatcaaatatcccccttcctggtttggaagagggaccatggtatgatttatatttatttttcatatctcacctgacactgtacgaatgtacgccggttcttcgtataaataatctggagcatttgattagccagttcaatgattgaaggataagagaattccccttcctctgtctccagatccagagaatcataaaaggtaagtccattgtccctggacaaactgagtcgtagaggagtgcgctttccccagttataaggcaccggattataggcaactgccagaatcccatcatgggtataaacacagtctatcccgctgcaattattgggcagatccgttggataagcttgacaccaggttctcccatagtcctgagaatcactgcggtagatcctccctctggtactgcgcatcagggcatgaatacatcctggccgtgactcccacatggcaggctggatgattccatcccatgcctgaatcacctccaaattgttttcccacaaagatccctttttcagaccttcccacaaatgttccctttttaaagcttccgaatctttatgtgctattggaatatcatacttcgtccaggtctttccctgatccatagagatatctgcatagcagtccattcgattacctgtctcactggaggtaggtgctatataatcaccgttggatgctatgagaattttatttctcacagtagctctgggggtataatctcccggaaccgcttccctggattcagaccaggtgtatcctgcgtctctcgattcactcaccagagtgtaccaggactgtacggtaagccctactttataatataaataaatcacctgctccttgtccataaaaagtacgggattccaatggggaagctgataaatatactttgttctcacaggctcctgccagcttccatttttacagcgcaccgtccagatcgcctgatccggggtcccctcgcaggtccctgcccagaaggctgcaagaaactcattctctccaagcctaatctgagtattggcgtgacagtcgtgaaaccaggtctgcttttcggaaaagaccggtttcttttttactatatgtattgtccccataattacatctccttttttaagctgtacttacaggtgacagtaaacggtttatttctctcctgaataataattttccacagatgccgccagatgctgtctcataatctcctctgccatttttccatccccagagcgcagtgtagcaataatcctcctgtgaaattgaattccatcttcattgccgccctcgggtattaatgcagtccgcagaatctgggacagcagatttgtcatagactgaacgaaaagctccagcagcagattatgggataattttgcaatggctacatggaactgaatatccaaactgatacgtttatccgtatcatctttatatttctccatattatcattaatttcttccaaaacatcaaaggcctgagcctcatttctctgggcagccagccggcaggcattggtttccagcatcatacgcatttccagaacctgctgatgttcaatattgtccataagaatgattctgttcaaaagctctgtaatacttttgttatcaggcttctctatatatgcgccctctcctgttctaaggcttaccaaatgacgctcctttaatattttgagagattctctcaccacatttctgctgactccgaagttagacgccagtgtctgctccgaaggaagcctttggccaatctgcgtagaatcattcagtatcattgcctccagattatctgcaatgctttcatataaattggttttttccacatgataattgattttttgcaaaatatcacccattctcttttcttatattattcttccacaagctgtccgctttttatttccttcccgttcattgtcacccaattcatattggtctgttttctgtctcgttctggaaaatccaaacgatgatgacagcctctggattccttcctcatctgcatgctgtacaagatcaatcttgcagaatccactgcatttcttgctctaaaaaaatctctgcagtcacgttttccaatagatcgcaggggatcgatctgcaagctttccatctcttttcctgcccctgcaaggccttcttcccagcggttaatacaagcatatttctgcataatagcccgtacctgtgtaagaatcgcttgaggcttttccataccctcacattcataaaaggaatgtacacacaaggctttgtctgtcatgcattcaaactcttttctgaaaatctctgaccactttttttctggtctattcccctttacaaggtctgcatactgagccgccgcctcaccggccgcccttccaaaaacctgtgttgccaagatacacagtccccccatacggttgggcccatgacatcctccggcactttccccgcaggcaaaaagtccctgaatatccgtggtcatatcctcatggagcagaattcctccattgaacccctgggcaaaaacatagagcttcatgggaaccgagctgtccaggccatgtctgtttaaaaaagactcccatagacggtatctgccttttctcatcttttgcctgtctggaatcacccacaagcctgcatctccctgccgtgcctctcctatcatggcaaattccagatattttcctttgctgtctgtactgaaggggccatgtttggcatgagccagaacacattcttcctctgtcatatcctggggcagatatttcctcaggcatgcctcccctttcgaattctttatctggggaagctcctcataagaaaagggatagtaattgattcccttcacaggttctacagaaccgtggacaaactggataaattccagattcacaagcctcgctccatgtctggctgccatggcataggaactgcctaaaagacgcccgtgggcagtcccgtattcataaaggtcttcccctcctccacaggccaggataaccgcatctgcaagaagacataccgcctctccctgctcatttatcccaacagccccgtaacaaattccctggtctgccaacaaagaaacaatcgtcaggctggatcggaaaatcaaattttctctctcctgtacaattctttgctggctttgtatgatttcttccagatcacttccaaaggctcctcttggttcagccccaaagcatcccacaatacctacgtccttcatgggaacaaaagaaattccctcttctttcatctgttcataagccctgcgggaatcaagggcaagcttttgtgccaattttttattcatacattccccggatgcagcaatcatttcctgcagaaaaacttctgcatccttctcgtctgatgcaaacagcatcccccattcgtgacttaagggataaaaagtagagccggaatttccaataggtgtttcactgacaagcaatacctctttgcccatgtccgcagcggttactgcggcacggatccctgcgcctcctccgcccaccacgagaatctgagaacgaacaatttccgaaaataattcttccattttttaccacctctatagtatggcatttttaaattttaaagtcaagctgcggtttgcagacagcagcaggccggttaaggccgtttgccatctgctaacctttcctatattcggcacagacagatcagccggatataagcgctcctcttttactcaggattggattcattatacagctcaatattttcattggtatcttccacgatcttcttcaccgcatcttccggagtgaagctgtcgtccccaaacattcttccaaaggaatccatcactgtatttctgaaatcatagtagcttccaaaaatagctcctacatattccggcttacagtcctccagctccttccaaatcttttccacaaagggcttactttccctatattccttatatacttcgctattataggccccttcacttactggggtataaccagtataggcggcgtagtatcccatgacctcgtcctgccataagtacttgataaattcccaggctcctgcctgactctcttcattttccttatcgatcatccacagggaatttcctcctggtgagaacgtacccccagcttctccatctgcataaggagcggcgatctgtcccaaggtaaagttctctatagcactctcctgctttaaaatccattgagagcttcccaccagcatcgccatgtctccagtaagaaatgcagtagtaacatctgtgctgtctattcctgtagttggcgcgtaattataatcctgtcccaagtagtcgtggaaggtctgaaagagcttgtccgccgccccattttcattcataatacaggcattgactctgccgcttcttccattgtcattgtcaaaggtaggttctccggactgacacatatattcctcaatctgccagctgtcattgataatggaccagccatacttggtttctcctgcatcgaccaccttcttggctgccgcatccaaatcctcaatggttttaatgctgtccggatctacccccgccttctccagtgcctcctgattgtagctggcagccagcatggtaacacttaaaggcatgcagtacaaggtatcctcaacggtatacaaagctctgatattttcctgcattccggaaacatcgaaattttcctcgtcaatatacttctgaacaggaataatattttcactatcctttaaatatcccatgcactccactacaatttgatatatatccggcagagcctccttgggcgtggctttaaattttgcaaaactgtcgtaccaatttccctggaattccgaattcacatagtacttatcctgggaagcattaaaatcattgacaatctttgtaaacgcttcctctcccactccgcttaacatgtgccataccgttacttgagtccttccctctttgctcacctcctgagtctcctcctgggcaaatacggtacctccccctgccgtgagtcccagtacagcgatcatccccaatgctgcctgtctgaaccatttcttttttcttaacatgtgacctctcctttcataaaataaatatattaatttttatggttaccccttgattgcacctgccaccataccttttaccagggatttctgccctacaatgaaaatgagtactgccgggattatggcaatcatagcggctgccagaaccaatccgtaattcgccccttctgagtccttgagaatacctgttccaacctgtatggtgcgcatactgtccttgtttgtaaccagcagcggccaaaaatattgattatacgcatttacaaaggcataaagcccaagagacgcagtggctgactttgatatgggaaatgcaatacgaaatagaaaattcatatcaccgcagccatcaatcaccgcggcctccttcaactccctgggaatggtgagataaaactgccgcagaataaagatactcataccagaagccaaaaagggcagtgtcaagcccgcataggtatctgtcagcttcagattacagatggttaaataattagagattaaatttgattcataaggaatcatcaaagtagcaaggatcaatgcaaacaatacttttttccctttaaactcaaaaaaagcaaaggcatatgccgcaaaactggcggtcacaatttgtgccgctacctcaatcaaacagaccagcaatgtatttttaaaataccccagcatgggcactctggaaaaaacctctctgtaattattcagcgacatactttcagacagaagtaccggcggcattttaaaaatatcagccattcctaaaaagcttaggcagattccataaatcagaggaaaaataactaccatccctgccataagctttataaaaaatagggaaccattttttacttttttatatgcttttccttttcccatttaataattcacgcccttcttctcaaataaaaactgaattctagttatgacaaacacaaccagaaacaaaatgactgactgaacacaggcataatcaaacctggtatttcgaaacgcctcctcatatatggaccagataagaatcctggtagactgatacgggccgccgttagtgagtaagcgtatctgggcaaaggtttgaaatgacatcacgatgttgtaaaaaataacaaagaaaatctgcggcgaggccatgggaatcacaatatgaaacaatctggagaaataactggccccatcgatctgggcgctctctataagttcggaaggtacattgcgaaagcctgtaagtaaaaaaatcacatacatgcccaagcctgtccacacagtcaccgccgccacgcagtaaattgctttgtccggctgagccagccacacatagctggttcctaatatataatttaaaatccctgcattgggagcaaatattagataccagatgacggatgccggagccgcggctattaccaaggacaccgtatacatggtctcatacactctgcttcctttttttctttctgtagctgccaatgccaataaaaaacctatgagaaaagaaggaattcccaccagtgcggcaaatttaaagcttaaagccattgtggcacggaaatcctctgaaaacaggattctctggtaattccgaagtcctacaaatttcactgcattccccgtcacatcagtcaatgtaagagaaagatatagatttttaaaaaaagggaaaaaaacaaatatcccaagtataactaagctgggaaccagaagtaaataaggggtaagcaccagctttttcctattcccggaaatcttctgtttcatatacctgtctcctcctttaaaggctggaaatatttcaatgtttctactgtccctgtatctgcctgatgtaagagcaggttctcctggcaagctcagtaagaaacagatggtccgttccggaagagatcatattgattcccatatcatgccaatactgtatgctttctttatcactggctccaatggaaacaccgattgtcttatgattttccttcaatacacccactgcctcctgaatcaattccgtggtacgctttccataaatattgttgatctcccccactgaaccggacagatcacaggggccaaaaatataggcatcaatataaggatttttcacaatctccggcaggttctttactgcagtctcggtctcaatttgaatgcacctgcacatgtcccagcttctttttcctatgtactcgtctatatcctcctgaccatattttacagcccgaatggggccaaatcctctgttgccataaggtggatataagctgcatcgcatggcgcgatctgcctcctgggcagtattgatcattggaaatataattccgtcaggccccatttccatcacccgcttggccagaatatcgttattccatggaattctcaccaatgtactggttccccctgcttttgcggcgatcaaatgattttggagtatttggtaatcaatggccgtatgttctgtgtcaatccataaaaaatcaaatcccacatagctggccagttcactgatcgatgaatctgcaagactgatatgcatacctgccatcggctcacaatctctcagtttttctttcaatgtcttcattttccccctccttttatttgttcatttgttctcttgtaatgctgtactacaaccttaccaccttacaatttacttgtcaataaaaaaacagttatcagcgtaaaatattctgttattaacgattttaccagttattttttgtcaactttgcacaaatcaattctatatgtccacaattaacacaacataaaaaagaggctgtcttacatctgtgacaattcatcacaaataaagacagtcctcttttctctactgttactcctctattccttacaccgcttcagccagtaaaagccattcccgggaatcataactcccgaggcgttcatctcctgcccggtgatcaggtccttatagcttccatcctgctcattgatccaggccattttgtcaaactcactgaaattgaagattcccaccagcttttcgccctggtattctctcacaatacagattaccgactgctcataagtctccagggtatagcaattggctgtggtgacaaagaccttttccatactgcgaatcttctccagcttggccagtccctggaagatccgctcctggacactgcccttttcatgaattttctctgccagctcccaattaaagctccctctgtgaatataccgggaatccggggccttctccggaatttccttataagtatagtcatttacctggccaacctcatctccgctgtagagcatagggatgcctgactgcatgaacataaaggcatgaagcatcaaatctctttgaatggcatgcttcatctgctcttcatcctgctcaaatccggccttttctattccacacatggaggctgaagttccgcagaagcgggcatctccggtcaccggatctgcattgtacagctcccctctgctgaagctgccctgggcggctcctgtaaaaaagtcattgatatattgcttgtgaggccgttccttcattccccactgctctagggttttgtagtcaagtccccagccaatatcgtcatggcagcgaagataattcaaaaatacataatccttgggaaggctgttcaaaacatccatctgcctttttaacaggcgcacatctcttgtggcaacagagttccaggtagttgccatggtggttacattataaagcatatgacattcgggcttctccacggttccaaaatagggggccacctttgaaggctccataaccacttctcccagcagaaggattcccgggcatacaatctctccgatcatgcgcatcatacgcacaatggtgtgaaccctgggaaggttccggcagtctgtccccagttccttccaaatatagggaaccgcatcaatacggatcacatcaattcccacattggcaaaatacaggaagttatacatcatctcattgaaaactctcgggttgccataattcagatcccactgataggggtaaaaggtggtcataacatagtggttgatctccggcagataagtaaaattcccaggtgccgtggtgggaaatacctggggcaccgttttctcgtactgggaaggaatccggtcattgtcgaagaagaaatatctgctcatatattctccttctccccttcttgcccgcaccgcccattcatggtcctcggaagtatgattcatcacaaaatccatgcacacactcatctgtttctggtggcaggtctcggtcacttcctccaaatcctccatggttcccagctctggctgcaccttacggaaattggataccgcatatccaccgtcagaacgtccttttggtgactccaggaaaggcatgagatggacaagattcacattacattccttgatatagtctaatttagaatttactcccttgagatttccggcaaaattatccacgtacagcatcatgccaagcatctcattttgtttgtaccagtttggactggactcacgctgtctgtccagctttttcaagctttcccgccgttctttgtaaaaccggtacatctggccgcatagttcgtcaaacatccagtcattgtgataaagctctgtatacagccacctcagttcatccaaatgtctggaaaaacgcaggtgatattccagatcctccggggattccttggtcacttcttcctgcaaatcttgagacaattccactggttcttctttacatacttccctggactgttcttcttgtgtttcttcggctacatcctgggattgtctccttggcgcttccttttgtgtctgcgtggtcagttctctttgcgcttctttgcgtacttccctggagatttttcctaaggcttcttcaactgcttcctggggttgagattgtgtccttggtgctttcttttgtgtctccttcggcaattcccttggtgcctcttcacgtacttctttcatggattccttggttcctgctgccccttttacctgctttacagccgtatttttagcaggattgctttctgttaattttcggtttgtcttttttctcattttctccctccttgcggcctccattggaatatgtttcccatacctgctcctgaacaaattttaaccattccctgaaggaggtctgaaccagtctcataataagcatttaatgtaccctggtttccataaatctctacaatctgccggtccaccagaatgtgcaggtcttttaggggctccggcaggatggtttccgtatccttccacaacaggcggtccttttctactgtgagactttcgccaaaaaactccagtctcaccggctcttctcctgtaatctcaagctgaatctctgtcactgcctcctgcctgctctcccatgcaaatcctgcccctttccaggaaaaactgcatgccttctgtttgctgttttcgtactcctccacaggaagaagctgaagataaatctgatctcttcgcttaatgaggcttagctgtctgggaaggcccattgctcctgtgtacagcttccccttattcttagtgcgaagccaggggatactcacccttcttccttctattccgctgtaggtctgagccgcataagccaggctcgtcaaataagaatcccggcgtatcccgtctgtatgataggtatatccgtcaaactggcccaaatagtaaaatccgtctgcactggtaaatacccagtaaatttcatcatcacattttagtggaaacaaatccggacattcccaggctttttcaaggacaatggtgcttgcaagctgccagtcctgaagattttcagagcgcaggaatccaaattcattgccctttaaccacagaaccatcacataggcccctgactcctcatgccagaagattttcggatccctgctctctggttcaagcacccccacagcttccctgggaagcttaaccaaatgttctcccctatctgtgctgtaggcaattctctgtgtaaaggctttgcctttgctccactcattggcatctcccgccgcagaatagtaaaacaaaagcgcatggtcaggaagattcaaaagtcctctggaatttaccagtgcgcagcctgaaaacatagtgccgtgctgatcaggatacagagctgtatccgtctgggtaaattcaagcagattcttgctcaccgcatgtccccaggacatattctgccactgggtattcatgggattatactgaaaaaagaggtggtataccccgtcagcgtaaaccagtccgtttgggtcattgatccatcccctctgggcagtaaaatgaagcagcggccgcaccaaagactcctgcagggcggtctcactttgaatgatattttcaaaaaaatcctttttcatgctgccctttaagattagctttttcccatggtatttctccacgtttatataactaaagtaatcataagaacccccgtcttcctctgcgtctgggacctgaaactcatacagcttttcctcttccagaaaaatttccagtgttttttccggcttttctgctgccacagggattcccaaataagctgatgtcacatttaattcgtattccatatgctctcctctcaatgctgtcttttttccagaaatctctgcctaaaaagcttctctgccctgggcagtcctctggatgaatttcctgataaacggacatgcacatacctgttcatacaagcatggaccggcacatcgccgctttccttttatagaaagaagcaggcgccagtattcccctatgggaaaaacggcgcctgctccgtcaattgtcaggattttacagctccggcaaccacaccgcttatgatctgtttctgtaagaacaaatataataccaggatgggtgctactgtcaaaacgagcccggccattatcgtgccgtagtctgcggaataggttccgtaaaatgcataggtagataagggcagtgtcataatctccttcttgcccagcacaagggagggaagcaggtagtcattccagaaggaaagcacgtttagaatcaccagtgttgaggtggtaggcttcagcagcggaaagactacctggaaaaaggtctgggtgttggagcagccgtccaaataagcagcctcctcaagggaaagaggaatattgcttttgataaatcccgaatacatgaacaccgacatactcatggcaaaccccacgtggaggaagatcaaggtcggtctgtgattcagcatattgaactgtgccccataaatggacaccagcgggatcatgatcgcctggaaaggaatgatcatagaggcgatcattagtgcatagaagaaatttcccagctttgatttaaaccgcacaatatagtaagccagcattgcggaaagtatgatcaccagcaaggtagcaagacctgtgatcataagtgagttggtaaagctgcggatatagttcattttctcaaatgccacggaatagttatccagtgtaagacccttcttgcccgtaagagaaaatggattggtgatgatatctctcttctgtttaaaagagtttaaaacaatgaggataaatggaagcatgtaaaacaaaaacataataaccaaaaccagcatggacacgccgtctctgatcttccgccttgtaccgccgatcgtctttttctccattatgcttccacctccttggatttgccccaggcaacctgaaggccgctgataatagccactaccaggaacaagaacagagcttctgcctggcccacgccgtaatttctcgccgtgaaggctttttcatacacatgcatagctaccagacgggtgcttccgtaaggatctcctcctgtcaaggtcaggttcacatcgtataccataaatgctctggacaaagtcaggaacagacagattacaaaggaaggaaccatcagtgggataataatgcttttcattctgcggaagccgtccgccccgtcaatgctggctgcttccagcacatctgtggacatgccggtgaagcctgccacataaatcagcatcatatacccggacagctgccacacggttacgatcaccagtgtccaaaaggctttgtccggatctgacagccaggatttgctgaaaattccccagcccatgctttttcccacgttcacaagaactcttgagaaaataaactgccagataaaaccaagtacaacgcctccgatcaggtttggcgtaaaaaatccggtacggaaaaagttctgtcccttaatccctgaggtgagcatgtaagcaaacaaaaatgccactacatttaccaggatcacactgcacagtacgtatttcagggtaagcagcatagaggtccaaaattccttatcctgaaaaagtgccatgtaattggccagccctacaatttcctttgctgtcttcaccccgtcccagtcagtcaaggtgagataaaagccgtagatgaagggaacaattaccactaccaagaaaaagaagattcccggaagggcaaaaattccaaaatttttaaattttttcttattattgttcatgtgattcccctctcactttctgctaaggcagcctgtcagaaatataaggcaggcaactgcctgccttatgtaagctttgctgatcaccgtacaaacagcaggtaaaattatttctgagaggtccagtaattgtcaagctcctctgccagaccagcagtatcgatctcatctgccagatatttctgcattgctgcacccatcacggaccagtgatcacttggtgcaacgaacatggaggtaaataccttgccttcggtcatgcggttcttaatatcttttcccagaggatcaactggctcaacgttattgtttgcgcaggccgggatcagtgcacagccctctaccagagcagtctgtccagcttcgctgtaaacgatccaattgaggaattctttggctgcagcgatttcttcatcggaagcatttgtcttgtcgatcatcacctgtttggtggcccctgcctgaatggaggtattggcaaaatcttcggtgtcattgcccagtacaaatggaaggaatccatattcatccgtatcctctgctccggcatcggtaaggttcggccatgcccagcagccatttacccataaagcagcgtcgccgtcaaccaggaagatgggatcctgctcataaagagcgcccaggggatcttctccgttaatgttatattcttttaataagctgaaggtgtctgtaaactgtgtgaaacgctcatagtcagcagccttcatggagccgtctgtaagcttgttgatgatctcctcagaacctgcagtggtgccgtcgtaggtatcgtagaggaagcccagctgatgtgcgcccagtgaccagtcttccttggaaattaccacaggattttccattcctgcttctcttaaatcttccagcagtttctttaaggaatcatagctgttaatggtggaaggatcaaattcttctcccaatgtatcctcaatggcggctttgttataaataatcccgcggccttccacacagaatgggaaactgtagatcttgccatcgtccagctttaaggtaatgtcctcacactcttcaagccagccttcctcagataagtcaagagctttctcttttcccagcgccacgatatctgttccgtccagcatagccattgtgggggctgttccagaattatacatacttgtgatctttgtataaggaacttctccgcttccgcatgccatgatgtcaacggtgatacccgtctcctcttcaaaagtaactgccatgtcttccaatgcggcctgaatttctcccttactgttcaggaaagaaatcttcgttccctccagcccttcatcatgggtaaaatcccctgcagatacggtcattgccatacccatcatcatagaagctgctgttgccatggctaccacttttctcacattcttcatcttttttcctcctttttctattaaagctctctttcatttggtaattgtatagtagcataagcctttttatatgtcaaccgcttatcatatagaaaatatggaaaaatgccctgttttttgtatttttagtacattttcacgaattcaaaatgggtattttgtctatattagccatagtttttccagtgtatttctattgacatttttctttatttgtgcattatgtaactatcgcttaacatgttctgcgaacaaagcggacaagcccgctttagctccccatcccctcactcatgagaggcttggtagctttgtgcgccaatgtgcagctgcgaagcagctttccctggcacattgtgtgcatcccccggagggtttttgttacataggaaagttctaagaactttcctatgtaacaagaaaagagtttcgcttgcgagactcgcgcctgcggcggtcgcctcgcgacatctacattgtatgccgcagtgtgcatcccgcccggagggctttttttcatgttataggcaagttcggagaactttcctataacatgaaaaaaagcccttcaaagcagtatggcttgtgccacactgtcttgaagggtttctctcttgagtttttagctgctttatgtagtctctctctccacaagggtcacaggaaaaacagttcttgcaggtaccattgctccagatgctgcctgtatcaacatgtttaccgccagctctgccatttccttcaccggctgccggatggtggttatacttggtgtcatgattgccgccacatttacatcatcatagcccacgatcttcattttctcaggcacaggtatcttcctctcccagcacacccgcacagcctgggccgcgatcaggtcagaactggcaaagatcccgtctgtctccggataagcgtccagtgcatctgtgatggcctggtaataatccagatcatcgtagaaatgctggtttgaggtgaccaccacatgcttcacgccccttgcagcgcacacctcctcaaaccccacctttctttgatccgcaggcatgggcagttcgcttaagcctccaatgtgcagcaggtttgtgcacccccggtcaattaaatgctccgccgccagacagccgccccggtagttgtcgcattccactcccgctgtgccttcatccagaaaacgctcaatggtgatcagcgggaatcctagatttcggaactgctctgtctgaaaggagccgctgcacaggatcactcctgccacccggttgctccggcacatttcaatgtattcctcctccttctcgttttttccttttgaattaaagagaagaattttatacttattattgtatgcggccagctccagattgctgatgagcttggcaaaataggggtgtaccacatgaggcacgatcacgcctatggtgttgctctgctgctttgacagggaacgggccatttcattgggctggtaattcagatccttcataactttatatacacggtttctggtctgctcactgatatacccgcggttattcagcactctggataccgtccccactgtcagtccggattcccgggccacatcctttaaggttgccaacgatttcaccttctttcagaaaaatgtcgttttttaagtaactctatgataacatttttcctgatcatatgtcaaccgttgcacatataacatttgccgaatctaccctacagcccatgcccttgtctattcttattcataaaaatgccgtccatatttgtgcagctcatccatcatgatcgccttattccttccattgaaggtagccggactggccataaagcctcctcctgcccctaaaacatccaccttgtcacggacataggcccgcagcttctcttccggtgcgttgggatcattggtccagccctcatccattgccccgctaaggatcagacggtcaccgtattctcgcttgatggcagccacatcgttcactgtctgagccggattccacatatccactccggcgtcgatcatatagggaatatagcgctcgatccggccgtcggaatgcatgttaaaataggcacctccatcatgggctgcctggaccacctttttcaaattgggagcgattaagtgttcaaagatcctggggggaataaagccatccttattatatccccagtcatcatgatagcagatcatttccacagggaaatgggcagtgagcttttgaatgaccttaaccttatggtctgtgagggcatcaaagaattccgccacctcatcctcgtcttctatgagggcctccagggcattctgcattccaagaagagagtgcagacgttcaaacagccctacctggaaccaccagtctgacattctgttttcgtcataatatttctttaagccctgggcacattcctcccagtccagtgcgtccagatccggaaacttcaccttgtcctgccagcctacaatggtatccagcatttcatctcccggcctcacaatggttgctccgattccaggctcaaaggtccacttgcagccgaaccagtctggccctgtcacattgtcataggaacgctcacagataatatccggagtgatgggataagtatccccggaaatagggagataccttggcttcttatgctctaataaaaggcgcatattttctctgggggaacagggcagatccggcgcatagggctttgtacccagaggggcacctgccagcatcttgcccacctgtggtcctgcagtggcagataccatgtcgatcatcagcggaagcattccattataaactctttctgacatactcacttacctcttttcctaatatatttgtcatcccggggatttcagccatccgcggcaggctttctaagatgagattcagcataccattcctgtgttcttgctttttctgtctctttctatgaatatatcattttttcagacaaaagtaaatatcatcttccccggaactccggtgcaaaacaaaaacgcacagaaaacttatacctgttgggcgtcccagtatggtttgcctcacaaggtataaaatctcctgtgcataaccgatcaataaaatttaactaaaaaatactacttgtctgctctggcatattttcgtatatcatttcccaccgcttgtcctgtccaggtgccatcctcctccatggaaatgcacacctcatcaaaggcaggatcttttatggaaaagcagaaattcactgtatttccgtaatagtaggtcccctgcagctccattggctcatagccaagctgcttggcacaggttttggctttcccggccagggtgtctatttcctcttgtgtcagctccggggccacaaaatagctgcccagctttgtatggaaatagttcaggtagtccaggactccttccgtgtaagaatcattcacctggcaaaagactgcctcatagaccgtataggtgttggtgtcataatcaggcagctcccactgcagctttacctgccgttcttcttccttccagtcaatggctgcatatacgggaatttcctctggcacctgctcctggaattggtctgcaaagctcttctttgcctgttgtgccagctgttgtgccagctccccatattgtgtgcctgccactcccgcagccttcaaaacaacggcctgcccttcctgggcaggtactgagaattctcctgaataatacacattgtcctgtggttctacctccggaggcacatctttggaccaggtcagggtcaaatctccctcttcattccctgcctggaacatgggaattgcaaaggcatctgcctcaatccccagctccctttttatctcctcccggaccatacggaaatattcttcttcctcctgggcctgaatctcccggcctgtgtgtttcgtatctacattcttctgggcctgaatctcctggcctgtctgttccgcatccaccttctcctgggcctgttcttccttttcctgcacatgcacggtttcatactctgccttcagacggctgttggccagaaccggaagcataaatgctccccctgctaaaattcctgcgcctaaggcaaaaagaagcgctgatatgagttttttcttcatttgtgtcccctcctgttcgtttctgccctcattgtacgcagaccatatatggaacatataggcctcttgtaaagaagttgtaaattattcaggctgggaaattgtgacggtaaccgtagttccctggccaggtgtgctggcaatccttaaggtgccctggtgggcttttgctatagactgacacagcgccagccccaatccggttccctgatgagatcgggtcctggccttgtcgatcatatagaagggctctgtcaccttctggatctcagatgcctccatccctgttccaacatcccggacagctaaaaccaggctatggtcttctttttttattgtcagccaaatctttccaaaagaagggctggccgccgatgcattggcaatgagatttcgaagaagtgtgagaagtaaattttcatcccctgtaatagcggatacttctctggataaaatcagctcctgatctttctccttaagcataggctctgtgatctgctgaagatgaccagccagtctctctgccgaaaatgtccccaccttcaactccatatcctggttcagccggctccattgaagtaaagtagaagccagagaatccagccgttttccttcccggttaatataacgcagcatctcgtaaagcttctccggatccggctccatcagcattccaatctccgtataaccgataatggaggtcatgggagacttaatttcatgggccagatcagctgcatacagctctctggtcctggcggtattttccaacatttcggctctcacctgcacggcttctgccatgtgattaaaatccgctgccagttttccaacctcatcactgttatggaccctcacacggctggtataatccccctgtgccatagttctggcctgaacccccagctcctccaagggcttcagggcatgtctgacccccaaatacaaggaaaccgccagcaccgccgaaattccaatcaacagccaggctgcaccgtaggcatagcttttttgttcattcagaaggcctgtgatatcctcccagtaatttacctggtaggttttatcatgcactttcataaaggaggctgccccaatgaagcttttctccccgtttttttggagctgataaacggcggttccgtcctgcgggggtgtaagctgccgaaagttcctttcctgcgttccagaatataggaccttcccattgctccccagaatgctgcaaaatgcccggtctccaagatatctgtcgtcataggaggctgcggcatccttaaccagcttatcaagggatatagcggctgaattattatcggagagggaaagaatattttcgcagaaggactggatattatagcacagggtagactgggccaaaagggccgagtcataagaattctccagaagcagcttttgggaagagcccagaagctgccatgcatagaaccagcacaccaggtacacgttcacaaacaccagaagtaatagtttcgcccacaagggcagactttttcttttcatctttcttattctttctttaccagcttgtatccaattttatacactgtacagatcacatccgtgaaatccagcttagctctgagatttttaatgtgcatatccacggttctggaattgcccatataatcatagccccatacacagtccaaaagcttttctctggagaaaaccatattgggatggagcatgagaaattccagcagctcatattccattttcgtcagctccacctgttgtcctgatttttgaaccgtgcgtccgtccctatccaaagtcacatctttttcccggattatccgggtttctggttccagccgccgcagggccacatccacccttgccagcagctccaagggctcaaagggtttggtgatgtaatcctccgccccaagattcaggccataaaccctgtctgccaattgggtttttgcgctgagaaagatcactggaatgtgttttttcttcatcaggggcaaaagctcataaccattttttccagggagcataatgtccagaagggccaggtcaaaggtacgctgctccagctccctggaagctttctctccatcatctaaaatcgtcacctggtactgccggatctgcaacgtggcggcgattaaattccctatgggcagatcatcctccaccactaaaatttgaaatgccattttgctgtctcctcttttctatttcgtatcattttgctgctgccttttcattcttgtaaaatacagccgccttgtttttcataagagacaccaattctcccagaaggacggatactgcaaagacaacgatcgttctcataaatatatagagatagcatcccacatcatactccaggaatctcctgttcataaacagcctgagcacaagatattccaggggatcatgaaagagatagatataaaataaattccgggttatgactttccatgcttttgagcgggccgcctttttaaatatccggcagcaaactgcagccagcagataggttaaaaatgaaccggcaacaatcacaaaaaagctgtccagaatcttatattgataatttaccacctcaatccctacaaggatgacaccggccgtaaggatctttctgaaattccagctgccatgagcgcttctctccttttcgaaaacatagcccaaggcaaaccagaaaatgtagcccatcccccgtttcaggcccagaacatcaaaggggagatagtcagagagaagctgtatgattccactggccagcaatatcagatagatgctatccagtttcatgtgccgaaaatatcctgccaccaggacaaatacgatcatacaccaaaacaacgctgtcaaaaaccacaggtgtccgctgtcctccccccacaaaaagcctttccatgccttgagcagcccctggttatcatagaaaccgccaagccgcttcactggaagcataaataaccatccatagacaaaataggggatcagcagtctgcggacctttgaccgcataaatacatcaaaggacgcaatgggttttaacgccagaaccgcaccggacagcataaaaaacaagggcatatgaaatccataaacccattttgacagccagcggcaccctgtgagaaaagcagagttgtaggcactgctcagcatttcaggcaattggtaatcaactccgccgtaggtggtctggatttttaaataggcactgtggccaataactacaaaaatagtggcgatcagtctcagccaatcataggtttcgttcctgcctgtgtgcgccgcactttcctgtccttgccctaacatctgccatcctcccattcgtttgttactattttaccatgatacattcaattttttcaacactccatggggttcctgccaggattttttccctccagcgtgaatttttgtaaaaaaaagaacgcccgccttataaaaagtgagcgttattatgaattggttcttctgaattcgtttcaatattacatttttccgttttctccgtctgcttctgcttttcctaacaaatacaagaacgctatggctggtatccttaaaatcggcaccagggtatcgtgctttgcgattccaaaatcatccagttccctgcagttacactgttatacttatgaaatttcccaggagttatgtaagtatattatagaaacagtcgatcaaagctgcaattggtggatgatggattgctgttttgtttccatatgcgcagatgggcataatgggccgcctgcctttataaatagccatagtgtcttcggtacctaaggatcaggaagatcgtcagcagaaatgtgagcagctccgcaatgggaatggctgaccatacacccgtcacccctaaaaatcttggcaagatcaaaagggtgatcaagataaagccaaatgtccgcaaaaaagagatcgctgcggatgctttaccgtttgacaatgcggtaaatagggcagacgcaaagatattgtagccagagaacagaaatccaaacgaaaagatggcaaatccttgttttgtaatttcaaaaacatttttattattctttgcaaaaaccttggcaatgctttccccagcaaaaaaggaaagcaagaatacgaacacagaaattgtcagtataaagcagaaacaaatgcggaccactttctttcgttgttttacattcccgctcccatagctatagcttataatgggggctgcccccatagaaaagccaatatagagagtcgtcagcaaaaactgagaatatatgataactgtgatcgctgccacaccatcctcacccaacagcttcatcattatggcattgaacaaaaatgtggtaacagctgctgacagctggctcaccatttcagacgcaccgttggaacagctctttaacaaaacagccacatccattttaggcctggagaaatgaagttcactcctgccagtgaaaaagaaaattgtaccgatcagcgttggtatcatatacccaataccagtcccaagagcagctcctttaattcccatattcagtaaaacaataaatatataatcaaaagcgatattggcaagccccgccaagacggaaaggatcagtcccaaagtgggttttcccgcagtcacaaatagattttgatacaggacctgcatgatatttcccacaacaaaaattagctgtatctccagataagctttgcagtatgggaataagatttcacttgcgcccaatccccagataatttcgtcaagaaatactccgccgatcatggtaataactaagcctgtaaggatccctgcaagaatgatgagcgtaaaatctcttcgggcttcctctggttttccgcttcccattttcatggcaacaacggcgctgccgcctgtggcaagcattgtccccaatcccacaattatgttaataaccgggcaaacgatgttaatagcggataaagcgtttgtgtctacaaaacgggctacaaaaatagtatcgatgatggtgtagagtcccataaaaaccatcataaccatacttggtaatgcaaatttaataagagatcctgcatgaaactcttttgccagtggatttttccgggtttcaggcatcactggtatcctccttgtttttgggaagaagtacgaaacgctgtgtggggtacccatattcaacaagcaattctctttgggaaaagccaaggcggcaatattcctcacggtaacctgtatctgccttatcacctgcacggtatgttgtcaaactgatttcttttccatagagaagctcgtcaaccaatttatcaagaaacagctttgtaactccctgatttcgatattgtggatgtaccgcaaaaaaatcgatgcttcctgtatgggccgtgtatcccatgatcccaattgccataccctgatcccgcaaaatcaaagcctgtttgtcagcgatgtactgatgcagattttcaatatattctgctttatccaggcacggatacccatcaatcgtaaggtctaccagctccatccaatcgtcaatatccgcagatgtggcaaattgtatatcctctttcgtaaagtccattcttacaggctcctcttttagatagatttccagttgcaacggataaaatacctccccttcccaaaaccttgccggagtggtcttatacattgctttgaagatacctgcaaacgcctgctggctttcatatccgctcataagggcgatctcaagaatcggcttttgtgaaaacaccagaagctttgccgcttctgtaagctgccgtctttgtgcataatcatgaatcgtcaaacccaccgtttttgtaaaaacccggtgcagatggaatttcgaatagtgcaatgccgccgctactagatctagctccagcttctcattcagattctcctctatataccggatcgcttgggaaacaatgtgtactgtctgtctctgcattaagccccctcccttccaatgagataggatatcacaaagagaatcctagcttttcattattcttgctatgttttcttttgaagtgatactggttactgcaatttttctttaatcccagcaatccattgttggattgcctgcaccaaaagaagctgctgatgcagaacagccatgcctgtaaccggaatatctgggtcattttctttcaatgtggtattttcctctaaataagttctcagcacatttagattgctttcaatgttctccacgcattccttctgtttttcctttgacatgctttctaaattaacgataactgcattaaagtctaaaaataggtagattggcttagaggatatctcaaacattagcttttcaaacgcttctttgcctgcatctgtgagagtatacactgccttttgcggcattttcccttctttttccgtatggcttgaaatcagccccttttcttctagctgaagcactttcttataaatagacggtgtgctgatttttacccattttgagatgtttcggtattctaccagtttctgtatatcatacgcactcaaagattccttttttaacatgcccaatacaatcaaatcaatggtcgccatttaaatttcctcctttttttgttgacaactactataaattatagtattataattctcgcattgcaactactatattttatagtactatacaacaaactatttatcaggtaaaaggagaatcacaatgaacagtcaaaacaaaaaaatggaactgctaggcagtgcatccattcctaaagcacttttaacaatgggtatcccaacaatgatcggtatgttggttaacgctttctacaatcttgtggatgcctactttgtcgctggattgggagaaagacaaatgggagctatttccgttgtctatcctctcggccaggtggttgtgggtctcggtctgctgtttggcaacggagctgcctcctatatttccagattgctaggtggcggggataaggaaaatgcagaccgggttgcaagcacagccttgtacagcagcgtttccgtcggggcagttctcattcttatgtctctggtgttcctacaccctatcttaaatcttttaggagcaactgacagtatcctgccttatgccgccacctacgcaggcatttacattgtttcctgtattttcaatgtgtttaatgtcactatgaataatctcgtaacaagtgaaggggcggcaaagacaactatgtgtgccttactgatgggggctgtcctcaacattgctttagacccgctgtttatctatgtatttgatttaggcgtggcaggggcagccatagcaaccgcaatctcacaagtagtttctacctgcgtttatctgatttatatcttgcagaagaaaagcatctttcatttccggattaaggattgcacctatacaaaggaaatcatgtatgaaattttcaaaattggcgtccctactctggtcttccagctattaacaagtgtttccatctctttcatcaacaatgccgccggtggttatggcgactcggtcattgcaggcatgggcgttgtcacccgccttatctctatgggcagcttgtccgtattcggattcatcaaaggatttcagcccattgcaggatatagctatggtgcaaaaaaatttgaccgcctgtatgaagcgatcaagacttccatcctctggtctactgttttctgcgtggtttttggtctggtactggctctgttccctgaggctgtgatttctcaattcacaaaaggtgatgttgaaatgattcgtattggcggggcatctttaagagcaaatggtttttccattatgctctttggattttataccgtatattcctccctatttctggccttaggaaaaggaagagagggatttctcctgggcgcctgcaggcagggaatttgttttatccctatcattgttctcctgcctatggtatgggggcttgagggcattttgtatgcccagcccattgccgatatgctttctgcgatcataacggtatttatggcaataccacttcataaagaattaaagaaaatgcagaaacagaccgattcactttaaataaaaccatcttcgggcaaaaataagcgtaccactatttgtaatggtacgcttatcgtcatttcgattgtcacaaatacaccccccactatcctatggggtaaaaattcattattatccggcaattttccaaatcaagaaactgctattcctgatataatctaacatctgcatcagctcatcttctgatcatccataagttttgtgaatctgattccatacacactcagtaataaatttcacgtataataacttatacctgattttttgaatctatcacattttttccccattcaataatttgttttgacattttcaatgcttctctggcatgccgttcttccaaaaacaattcactgggataacgtacagcaactccatatggcgttaattcatccgcataatcatagagtttttcttcaatcacagcttgcttttttatttgattcataagaaacgacaagtcatgcgaccttggaatacctccttgcagaccgcctgacacgataatgccctttatgattttttcggcagcttgctgacaatgataacagattatctcaattggtttaggagaatatgtttcaaaaagatgtttcgcaactccataatccatttctgccatatcaatccattgttttatttcttgattcatataacagtactccttttcttgatacttcattttccactgataaggtattttttctatcttcaaatcggctttctgtcccaataacaatatccaccggacgtttttttatctttcgtattgagcgatatgcctgtgtggttaagtcttttaaatccttcactttatcttccacaacaatgtaaaagtcaagatcactatcttctgtataggtttcattagcaaaagaaccaaatagataaattctcaggggagtcaattgattaataaactgctcttttagttcttcaatttcctgtattggcatagtctcaccacctcttaaataatatgattacctctgtataaccatattatagcatcgtactatatagttgtcatgtaatttctaaacttacacttttacgaaaaaagacctcaaatcataagatttctcctatgattcaaggtctattccttttatttactcatgtgttattttgcttagagcttgtgctgaggataatgactttctcgcactggtcaataatagtgtttaccctatgacaattagatatctcttcgcttacttattattgatcgcagcctgtgcagcggcaagttttgcgatgggaacgcggaacggtgagcaggaaacgtagtctaagccaatcttatggcagaattctacggatgttgggtcaccgccgtgctcaccgcagataccgatgtgcaggttggggttcactggttttcctaacttgatggccatttccataagcttgcctacaccgatctgatccagttttgcaaatgggtcatactcaaagatcttggcatcatagtaagcattcaggaacttgccggcgtcatcacgggagaagccgtaggtcatctgagttaagtcattggtaccgaagcagaagaagtctgcttcttttgcgatctcgtcagcagtcagagcagctctcgggatctcgatcatggtacctacttcatatttcaaagtgctgttggcagctgcgatctcagcgtctgcggtttcaacaacaactttcttcacatattttaattctttgatgtcgcctaccagcggaatcatgatttctgggcacactctccagtccggatgagcagcctttacattgatggcagcgcggatcacagcttttgtctgcatcttggcaatttccggataggtaacagccagacggcatccacgatgtcccatcattgggttgaattcatgaagggaatcaatcacagccttaatctgctccacggtcttgccctgagcatcagccagtttcttgatatcttcttcttcagtaggaacaaactcatgaagaggcggatccaggaaacggatggtcacaggattaccttccagagcttcgtacagtttctcaaagtcgccctgctgtacaggaagaatcttctcaagagctgcctctctctcttcaacagtgtctgcacagatcatctcgcggaatgcatcgattctgtcgccttcgaagaacatatgctctgtacggcaaagtccgattccttctgcgcctaactcacgtgctttcttagcgtcagcaggagtatctgcgtttgtacgaactttcagttttctatatttgtcagcccatgccataattcttccgaactcgccggagatcttagcatcttctgtgtcgatgataccatcgtaaatgcagccggtggatccgtcgatggagatccagtctccctcatgatattctttgccggcaagaacaaatttcttgttctcttcgtccattgtgatatccgcgcagccagatacacagcaggttcccataccacgggcaactactgctgcatgggaggtcataccgccgcggacagttaagataccctgagcagctttcataccttcaatatcttccggagaggtttccagacgaaccagaactaccttttctcctcttgcagcccattctttcgcatcttcagcagtgaaaactactttaccgcaggcagctccaggagaagcagccagtgctcttgcagccggagtggcagctttcagtgcagcggtgtcgaactggggatgaagaagggtatccaggttacgaggatcgatcatggcaacagccttctcctctgtgatcatgccttcgtcaactaaatcgcaggcgatcttcagagcagcctttgctgttctcttgccgttacgtgtctgcagcatgtacagatgcttgtcctcaatggtgaactccatatcctgcatatctctgtagtggtcttccagcttgttgcagattgccacgaactgatcgtaaacttctggcataacttcttttaactggtcgattttctgaggtgtacgaacaccggcaacaacgtcctcgccctgagcgttcatcaggaactcgcccatcaggtgcttctcgccggtagctgggtcacgggtaaatgcaacaccggttccagaggtctcgcccatgttaccaaatgccatcatctgtacgttaacagcggttccccaggaataagggatatcgttgtcacgacggtaaacgtttgctcttgggttgtcccaggaacggaatacagcttttactgcttccattaactgattcttaggatcagttgggaagtcttcaccgattttttctttatattcagccttgaactggttagccagctctttcaggtcatcagcagtcaggtcaacgtcctgggtaacgcctttctcagctttcattttgtcaataagctcttcaaaatattttttaccaacttccataacaacgtcggagaacatctggatgaatcttctgtagcagtcccatgcccaacgaggatttccggattttgcagccagaacttcaacaacctcttcattcaggccaaggttcaggatggtgtccatcatacctggcatggatgctctagcaccagaacgtacggaaacaagcaaaggattttctttgtcaccgaatttctttccggtaacctcttccattttggtaattgcttccatgatctgacccatgatctcgtcattgatcttttttccatcttcatagtactgagtgcaggcttcggtggtgatcgtaaagccctgcggtacaggaagaccaaggtttgtcatctcagcaaggttcgcacccttaccgccaagaaggtttctcatggttgcgttaccttctgtaaacatataaacccattttgccatcttacattttcctcctattatttgttctttacacaattatctatgtttcttataagcacatagttattttatagacttcccctccattagtcaagggcaaatgtggcaaaaaaggggaaaatcttccgtgattttcccctaaaactttgtcttatttgccttttctcttcaaaaccaaatgtcttggaagaccatttaccataatcggctgataatctccctggatcagcggcttaatataatcgatgaaatcttttgtcacatagttggcttccttgttcatccaatttctgggcaccagcttctcctcattggcaatgcggtgcacatcatagatacccgtggctgacatatacgggtcatcggaaacacggtcgatgacgatcatcttgcccgtatctccctcatcggcagccttcactgctgctccgcctaccataaaggcttcgtcaatatccactctggaggccatatgggaagcacttctctgaagggtggagagctctacggctcttgtcttgcagccgcactctgcagacaggaagttggccagataggtggcggttccctggagctgtttgtggccgaaggcatccacataatctcccacgctgcccagctcgcatacatagcggccatctgccagcttaattccttctgaaacagcgatcgtcacagaggatttcttcttcagaagatcttttacctttgccaggaatttgtcgatgtcaaagggtacttccggcagatagatcaaatctggtccatcgcagtcctcggacttggccaaagcagtggctccggtaagccagcctgcattgcggcccatgatctccataatggtgatcatatttttcttgtatgtgagaccgtctgcatcacggatcacttcttttgtggaagcgccgatgtacttggccgcacttccgaatcctggtgtatggtctgtcaaagccaggtcgttgtcaatggtctttggcacacccaggaatttctggctctgtcctgttaaaattgcataatcggacagtttcttaatggtatccatggagtcattgcctccgatataaataaaggcatcgatttccagtttgttcaaaatttcaaaaatcttttcataaatcgctttatcctcatggatttcaggcagcttataacggcaggatcccagaaacgcagagggagttctctttaaaagctcaatatccagctcggaatgaatttgggtggataagtcaatgtactgtccgtccagcattccctgaattccgtgaagcattccgtaaaccttgtcaaaaccacgctccactgcatttttatatacgcccgcaagactggaattaataacagatgtaggtcctccggattgtccaacgataatatttctcttttttgccatatgattgtcctcctcttacataagcctcattaaagggaattgtaacaaaattatcagagttagtcaatgtaactttgtcattttttacaatttttctttggtgtgcttcgtgtatttcctccaaactatggtattattttctaattgtcctaattattttgcacaatttgacaattttttctccccaatggcagcttttatgtatctatgatccagaagggtctgcccggaattcccggttagaataaagaaaaggacacagaccattggatcgtctgccaacagtctgtgtctataggattaaaagttatgtcttacccttatggtaatccgttttttgcttcctttagccataggccggatgcatcggatcaagggatatgttatcgtacaagaaaggaatttcaagatgcatgtaaaaatttaagtgtcagaacacctccttactcctgggtttctgctgcgtcttgggtttcagaaggctctgtggtgtctgtaccttctgaagtatctgtttcgtcagatccctgggaatcctccttctcatctgctgcttcaggtgtctcctgcggaccggcttctttgctttcttccccagagatcactgtgatggtttcagcgttaccgtcctcatcaaaggtaatggtaacaatatcgccttccttaatatctgcaagggtgatttcctctgtgggaacgtcctctttcatcaagctgacatctgccgtaacatcatctgccacgtctgtggtatctgttgtttcagtggtgtttgtaccttctgccgcatctgttgtctcggtggtgtctgtaccttctgcctcatctgttgtctcatcggtgccctctgtcatatcggaggaatccccagagggatcttcttttatctcataagaggttgcgtcctccattttctctccctcgatctcacggagaatgatggtattctctgtcacggagatggtctcttcctcccctgtgagttcaatttccacgggttttttcatggaataatcttcgggggcagtgtctttacgtaattcatcggatgcttctgtggtgtcatccgcagtctctgcgtctgtttcatccgttgcttcgtctgtattttcttcacctgctgttttctcttcgcctgctgccccgtctgtttcctgggcggcctgtgtatctgcctcgttgtcttcagaagatgtttcatctaaaccggctgcatctgcgccgggaatatcgtctttttccttcaaggtgcccacggcaatggtgatggtgtcttcatctacagtttttacttcaccggaaacttcctcccgaagagcttcctgtgggtgagcttctgttccttcctccccggctgtctcgtctgtagcggaagcctctgtatttgtatctgctgcattggaagtatctgctgcatatacattcatggaagaaacggtcaacattaatcctaacatcattgctgcgtattttcttttcatagtttatcatgtcctttctgatttctgttgatagacacactataatcagaaaatgtgttcattgtgtgaccactatgggaagaatttgtgatgattatctatactgttccttaattttataaaatttccgtaaaatacaccatttacacttttcatctctgctcttggaaccgccttgtttttggccgttttttcgttctttttccttttatagaaaaagtagaaaaagaaaaagcccccggccgttcttattaggaacaaccgggagcctcctgatatctccatcgtaatattagaaagtaaacttgtctgcaaagtacgcatccagctcctcaatcttcacacgcacctgctccatggaatcacggtcacgcactgtgacagcctggtcctcctcagaatcaaagtcgtaggtgacacaataaggtgtcccgatctcatcctgtctgcggtatctctttccaatgttgcctctctcgtcgaattcgcagtagtatttcttggaaagctgctcataaatcttcatggcaggctcggaaagctttttggaaagaggcagcacgccgatcttcacaggtgccagtactggatggaagcgaagaacggtacgcacgtcattcttctctgcatccagaacctcttcgtcataagcgctgcacaaaaaggcaagaaccatacggtccgctccaagggaaggctcgatcacatagggaatgtatttctccttcttctcatcatcaaaataggacatatcctgaccggatacttcctgatgctggcttaagtcatagtctgtcctgtccgcgattccccacagctcgccccagccaaaggggaagaggaattccacgtctgtggtggccttgctgtagaaagccagctcctcaggatcatggtcacggtagcgcacttcttccttctttaggccaagggtgctcagccagtccagacagaactgcttccagtaggcaaaccattccagatcggtgtcaggctcacagaagaactccagctccatctgctcaaactcacgggtacggaaggtaaagttgcctggagtgatctcgtttcggaaggatttaccaatttggccgataccaaaaggaattttctttcttgaggtcctctggacgtttttgaagtttacaaaaataccctgcgccgtctccggtcttaaataaactgtattcttagcatcctcggtaacgccctggaatgttttgaacatcagattaaactgacggatatctgtgaaattgtgttttccacaggtgggacagggaatggcatgctcccggataaagtccatcatcttctgctggtcccagccatccacagtgccctccagttcaatgccgttctgtgcacaatagtcttcgatcactttatctgcgcggaaacgctcgtgacattccttacaatccataagagggtctgagaaaccgcccagatgtccggaagccacccaggtctggggattcataaggattgcacagtccacgcccacattataaggagattcctggacgaatttctgccaccaggctttttttacattgtttttcagttctacacccagattgccgtaatcccaggtgtttgcaaggccgccgtaaatctcggaacctggatatacgaatcctctggccttggctaatgcaacaatcttctccattgtcttttccattgttattctcctcaattatcttatatttaccttagcaggaggaaatctgcccctgttcacagatgacctgaaacaggtaatcccctgcagttacggttcattatactaacaagtattgtatttttcaacaggtgcattggaaaaaatacagctttcccccggatcatctgcacataagctccaggatatccaggctcttgaactttttatctgtatttctggccatgtatgtatggaccacctggttcacttctcttagcacctccggctttaaagaaaaagtatacagctttcccatctgggccgttgccatatactgaagggcatacagggccgccggggagattcttctggcatcaggcacctccctggcacagttgtggcacagggccccatgcatggtctgagaaaagaaggacagctccgcctcctcctgccctgcttcacagtggacacactggaagatctggggatattccccctggatcaccatggtgcgcagttcaaacacacagcggaccaactcattgtcaatggcaggattcagaagagccctgaagcttatatagagaaggttcatcatatccttctcatccacttcctccctgccaaaataatccgccagctccaggaaataaaagccataatacacccccggctgctctcctgccagctccacaaagtggtggctcacactgacctgattcagattaaaactggtgcgcccctcatagagggtgaaggttccaaacacaaagggattcgacgctgccaaataggggctgttgggtcttcgggcgcctttggcaaacacagagatttttccccgctgcctggtaaggagcaccagacgtttatcgtattctccaatgggcatcacggaaagaacaacaccttgtactgtgactagatcactcatgctatgccccctgtcctgtgtgctgccttagatttcttttctgtcatagccgaagtttttcatgagaaaatcactgtcacgccagtcctttttcacctttacccaaagcttgagatttacctgggcttccagcatctgctccagctcatagcgggcattgcttccaatcttcttcagcatggccccttgttttccaataatgatccccttgtgtgaatccttctcacagataatggtggcttcaatatccatcatctttctcttgcccggccgttccttcatctggtcaatggctacagcgatcccgtggggaatttccgcatccagtgcatgaagagccttttcccggatgatctctgccacgatctgccgcatgggctggtccgtcactgtttcctcatcatagaacatggggccgtagggcagatatttaaaaatgcaagggataatctcctgggtgttctgcccccgcagtgcagagcagggaatgatctctgcaaaatcgcagattttccggtaagtgtcaatggcaggcagaatctcctccctggaaacggtgtccaccttattgatcaccaggatcaccggaacgccgatgctttgaagctgctgggcaatgtggcgttctcctgccccgataaaggtactgggctccaccagccacaaaatggcgtccacctccttcaaggtgcgctccgccacctggaccatatattctcccagcttattcttggccttgtggatgccgggggtgtccaaaaatacaatctgcccctggtcacaggtataaaccgtctggatgcggtttcttgtagtctggggttttttggatgtgatggcgatcttctggccgatcaggtgattcatcaaggttgattttcccacattgggccttccgatgatggccacaaagccggactttatctgttcactcatatagtaattcctttccgataactgtttcaggaaaataaatgctttacttccaggaacagatttttttctttttcaatggcagtctcgctgcccaccacacagatctggcctgctgccaggacagcctccacgatagcggccagtgcctggatatcctccactgtggcatccaggatctgttctctttccttttgaaccatctcctgggtaatgttgctgaaataggcagttttagatatatttcccaccatctgaggggtcctgggcacatccttgccgctgatagtgccgatgatatattttgtcatttcccgttcatctgcctggaaatcccggatataggcaggaacgcccttatatacctccagagtctctcccaaatggggatcccggtaggatacgaagaagctctctccgttgcgtttaaagccactcatacatccgtaggcaccgcccttcacccgcaggttcatccacagatagtcatagctgaggatcacttttagaatatccagagctcctgtgtattcaagacctgcctttctaaagtttcctacctgagccacatactgtacctgaccggaggtcttgaagccttcgtttctcacaacacattgggagatcatggaggatttttccacagtctgtgtacacaggcacttcttcagcttatccgcctgctccatgaccataggccgctggggctcttcccctgtatagctcacagaaagattttccggacggaaaatatgcttcatgagaagctccagcttctctatcaccgtctgctttctctcctggtaattcttctccaggtcctcaataaaccagtagaagctgatacctgccatctggtcctggaaccagcccatgggagaagcataggacattgcccgcagcaccgcagtggaatgtccggcgcttaccagaacagactgggccctggattttaactgggcaataatctcatacagacgtttctcgtcctccagatgagaatgctgaagaatctcatccatcatttggaataagaattccacctgctcatagagggcctttcctctcaccccaaacatggcacggaattcacccattgcatctgcctggtcgaaaacctccacaccgcaggtgatccctccggagcctgcattgatctcattaaacagctctccataggtataatgatccgtgtccacataccccagaacggccttgagaaggcccagatagggaaccagctcctggggcagctccttcagatcaaaaaggagatttacataggcaatgccgttggtacatacattatggtaaaggaagagggtgtcttccataaaatactctttgttataaaacaggcctgcatcccggctgatatcctcccgcttcagcatgggaatgcattttaacgcctccggatcctcctctgcctcttggtagtccacaagggctttcgtcttctccacaagctgatcaagctcatcctggctcaggctgcaccggtaagcctccagcgcctcctccactttctgctcctgcttcatagccagacccttttccggcttcaaagtaaggaccgctccgtgggtgttgtccagaagacattcctgaatgagcttttcaaaatatccggtgccggcatcctccttcagctgcctgaaaatctcaagctgctggatggccgcaaagggctcctcgtcgtcatagagccaattgcccaaaatatccagcccatacatcagtcccttgggataagaggcaaaatctgcctcccggtagcggaattccatgtagttgatccctgcctccacggcttttttgtctattccctctgtggcgatctgggtgagcacctggcggattatggatacaaattcttccttctggccttcatttgccccctttgccacaacggtgaaatagggctgaaggatcccgtcatcaaaggaaccatagatatccttgccgatgccagcgtccagaagcgcttttttcaggggggctcccggggcgcttaaaagggcataatccaaaatctcaaaggctgtgcattttttgatgtctttggctctggccactaccatattgtaggaaaggtaggtgttgtccgcctcttcttcattttctgagatggggtacggctttaccacatcctgtacctgcgcaaagccttcctggtaagggatggtggaatccacctctagggcttcaaactgggacaggtatctttcatggataaaattcagcttctcctctgcatccatatttccgtagagatagatgaagctgttggagggatggtaatatcttctgtggaaatccaggaaattctcataggtaagctccggtatatgaatcgggtctcctccggattcacagccataggcattgtccggaaacagcgtgttcatgatctcccgctccagcacatcatccggagatgagaaagcgcccttcatttcattgtaaaccaccccgttgtatttcaaaggaccttccgggctttcaagctggtaactccagccttcctggcggaaaatctcttccttcttatagatatttggaaaaaatacagcgtccagatacacatggagcaggttctggaaatcctgttcattgcagctggctaccggataggtggtcttgtccggataagtcatggcattcaaaaaagtgttcaatgagcccttcaccaattccacaaatgggtccttcagaggaaattccctggaaccgcacagaacactgtgctccaaaatatgggcaacaccagtgctgtctgcaggcggggtgcgaaaagcaatattgaacactttgttttcgtcttcattctcaaggaccatcactcttgctcctgttttcttatgacggagcagatatcccatggaatgaatgtctgttaaattctctttctttatcagttcatatgatactagattctctatattcatagatacctcctgtaggttgtaatggcagcgcttttgtctattttgtgtcaattcaaaagacattataccattctttcccacagaagtgcaagcatatcatctcttcagcagctcctgctgcagctggcccggctcctcaaactcgtccacaccatagtgacggccgtaaacctccttggcagcccgggtgatcaaagccagctccttctccatccgcagttccttgggcagtctcaccgcaattccataaatatctcccgtgatcttatctgccactttctcctcagacagagagatcaggcccataaagccggaattgtagcttttatctgacatgcaggaatggatatacagttccaccagatgacagcactcctcatagaggcactgctcatagtcctcgcccatttcctgcagcctggcaaactgaaggttgtccagcattttattcacatcttttatggtacgcttcaggccgcccagaattcctcctgtatttccgtctgcgtattttaacgtcatccacaggcgcagaaaaccgtcgcatctgcttcccttcactgccttggagggttcctggtagcggatctcccacagttctgcgcggatcttgtttaactggggatcctcaccctcttctatggatttgtccagtatcttttttcgtttcatggggtctgtttctttataatagcgttccaccagcgctgttttattctctgccatgtcatcctccggtagtaaattcctcctgggctgcccccaagttactcttcttcataggtaagctctgtctcagccatggacagggcttcctcaatgacctgatccatgtccatgtagcggtacatacccagacgtccgccaaacaatacatttttttcctccagggccctgcgctcatacttggcaaaaagctcatcgttcttaggatcgttgatgggataataaggttcctcccctttttcccacactgcgggatattctctggtgatcaccgtcttatcctgggtgccgaaatagaaatgcttatgctcaatgatcctggtatagggaacctcatactctgtataattcaccacggcattgccctgataattggccatatcaagaacctctgtctcaaagcgcagggaacggtactccagctccccgaaacagtagtcataatattcatcgatcatacctgtgaaaagaaccttgtccgcctgtacctccagctccctgcggttggcaaaaaagtccgtgttcaggcacacctgcacgccttccaaaagcttcttcaccagatgggtgtagccctccttgggaatgccctgataaggatctttgaaataattgttatcataggtataacgcaggggaagccgcttgatgataaaggcaggcagatccttacattctctgccccactgcttccgggtataaccctccaccagcttttcatatacatcctgtcccaccagggccagagcctgctcttccaggttctttggatgggtgatgtgcattctggcgatctgctcctgaatcttggcctgtgcctcagccggtgtgcgcacaccccacagagcatggaaggtattcatattaaaaggaagattgtacagctcatccttatagacagcgatgggtgagtttacaaaatggttgaattccacaaactggttcacatactcccatacccgcttgttggaggtgtggaaaatatgggctccgtatttatggacctgaattccctccacatcttctgtgtacacatttccgccaatatggtctcttttgtcaatgacgagacaggtttttccgcatttggcagcttcgtgggcaaatactgccccaaaaagccctgcccccacgattaaataatcatattttttcatgatgccaccttcttttttatctttcatatggtgtattatatcaaacctttcagaaaataggaagaggaaactgttatctggataacagaaaaaggaggatgccgccggacatcctccccttgatcattttatttcatattcgcaactcggtcgaactcctcctggatttccttgtccggtgctttggttgccagactgaaaattacgatcatcagaaggctcaccacaaatcccactgccagtgaatagattccagtggatgttccaagggtctgtcccttggccagagggatataatcccacaggatcacagtgccgccgccggatatgatcccggcaatggctcctgccagatttgtcctcttccagaacagagacaacaggacaatggggccaaaggcagagcctaaacctgcccacgcgttggataccagtcccatgatgctgctgttggggtcccaggcaatgacaaaggccaggacggctacgaccataacagtgatacggcctacccgcagcacttccttggtgtccgcatctctttttataaacttatgatataagtcctcagaaaccgcggaggctgtcacaagaagctgggaatctgccgtggacataatggctgccaggatcccgcacaggaaaattccgccgataaagggcagggccagatcatcggtaaataccctctggatcatggcgataaatacactctcggaagaagcctggccttctgttcccaaaataacagggagaaggtaggcacggcccagaacaccgatgagacaggcagcgcccagtgacaggatgtcccagatgatggctatgtatctggattttttcaactccttctcatcccttactgccataaatctggtaaggatatggggcataccgcagtatccaagaccccaggccagctgggagaaaatctcaatgcctgtataaggccggtctccgttcatgaacatattcaggaaggaggaggagcctcctgccaccccgctctggtccaaaagggaggtaagattacccggaagcataaaataggccacaatgggaacgatgagaaggccgatcagcataagggtaccctggataaagtctgtcacacatacagccataaatccacccataaaggtataacacaaaattacacctgcgccaatggccagggcaatgtgataatcaattccaaacactgtattaaacagctttcctcctgccgccagagcagaggctgtgtacaccaggaaaaagatcacaattacaatggaagagaccaaaagcaaaattttgttcttatcccggaaacggttctcaaagtatgccggaatggtcagcgagttgtttgcctcaatggtatacctgcgcagtctcttggaaataaacacccagttgcacacagtgcctaaaaacaggcccaccgcgatccagccctgcccggtacccatggcatagatcgctcccggaagtcccatcaagagccatccactcatatcagaagcctgtgcggacaaggctgccacccagccattcagtccgcgcccgccaagaaagtaatcttctgagctcaccgtccgcttcatgtagataaaaccaataattatcatcaaaagcagataggcagcaaaggcggctaaaatgatcattgttgtactatccaattttttccctcctcatatcttttgcagattcccggtcctggctatcctcttacagccggaaccggcatatgtaatactttaccacagcaccaatgcaaaaagcaagaggtaaatgggcttttagaaggcggaatgcaaattcgcattccgcctgtatttttacctcttcttcaagtaaacattttttatatacctcagggtctttttctccccatggtcgctgagtatacgaagcagcgcttccagatctcttttcgtctccggatgaatgaaccacagttcttctctgcttttcataaaataattcaggggctccttattggtgtaggcatctcccatataatttttggaggcgctgatccggtccatcaccatctccgccacatagtttctgggcatttttgcccccatgatcacatggctgccgtccagacagtagtccacccaatgctcaaaatggtgcttgtttcttcccttgtggtgaagccaggccatggatactccggtggcctcccgctctgcattgttcgggcttctggtgccctgatagtatctgcaccccactagaaattctgtgggggaatatttcgacagatcatggagcagtccctgcttataaagtccgatctgaaagcaatatttcatcaccatccatttatgcctggtaattgtacagaaatgcttccatggatgcattcttgatcactcctattttcccagcagcaccaggatggtcctgggctgcacggttactgttttcttttcttcaagcacaagcggctcctccagaaatcccagagggctgcccgtatccagaacaatactccagtccattccctccgacagattgggaagggccagctctcttggctcccagtggaaattgtaggccacatagataaattcttcctttccctccctggcatatgcgccggaatacatgatccccacacagcggcaggtattgtcaaggcaggtataccaggcccgctggctgtgaagagacacatcaggataaccaatggccagataatccatgcccttgagttcctctgaggtatgaagaatggggtgctcttttctgaaggctatggcttttttcacaaattcctggagctcctggtatctcttttgatttttccagtttacccagcccacaggattgtcctggcaccaggcattgttgtttccctcctgggaattggcgatctcatcccctccatagatcatgggggttccctggctgaggagcataagcaggaaggcatttctcatctggcggatcctggctgagagcacagctttcttcctggttggaccttccacgccgcagttccaggagtaattgtaggcacagccgtcctggttgtcctccccgtttgcctcattgtgcctgaaatcataggacaccaggtcattcatggtgaaaccgtcctggctgaccatatagttgatcaccccatgggtctggggatttctccgtatgcggtagaccgctccagctgcagagtcctcatcacttttcagaaaacggcgcatatcctgctggaaaccggtgttgtactctgccaggttcttcaccttaggtatcttgtctccataaactttccagggctcaaatcccaccaccatcagcttggaggtacacagtaccggatcctttaagatcagccccataggcacaccatctcccagaagatgaaagccgtccacatggtactcggttttccaataacgcagggcatgaagaaccagaagggaatccacatttccagggaagaaaaattccataatgcattcaattccttccttatgaagggctttgataaaatccttcacctccctggcaggctcttttcctgcacagtaggagcgcttgggagcaaaatagaagccttccttgtagccccagaaatttactctctcactgtcctggcggttggtgacaaagcctttatgattttgaggcataggcagctccagaaattcataggagggcatcaattcaataccattgactcccagctccttgaaataagggatcatttcctggagtcctgcaaaggttcccttcttcttcaccggagcctgcttggtaaatccccgcacatggaccttataaaggacaagctcctcatatgggatccccagaggcttctctccctcccagtcatactccccgaatgtgtgtattgagcaccgcaccttgtgaatatcatccggctctaagtgctgcccgaaatgttccagaccatttatctgtgtagcccagggatcctggaacacctcgccgcccaccatataattatattcaaagctgtctgcatctatttccggaagaaatacagccgcaactctgcccacccggtcctgtacaggcagggggatttcttcaacgggagtcttgcccccctttttatagatcaacagggaggcatcctgaccgtccgggatctcaacggcaaaattatatccctctcgtcctttgtgcacgcccatggatagtgcatctccggattcccatctgaatcttgtgtgcatggctatatccaccaccctttcttatctttggtcctattccttaatatccagctctacgggacaatgatccgagcccagaatctctgtgtgtatcttggcatccacaagccggtcctgaaggcactgagataccagaaaatagtcaatacgccagcctgcgttcttttccctggccttaaagcggtaggaccaccaggagtaaacgccctccatgtccggatagaaataacggaaggtatcaataaatccattttccagaaggcggctcatacaagcccgctcttcatcagaaaatccggcatttttccggttggtcttaggattcttcagatcgatctcctgatgggccacattcaggtccccgcacaggatcactggcttggactcctccagttttttcatataggccagaaaatctgcttcccactgcatacggtaatccagacgttttaagccctcctgggaatttggcgtatagacggtgataaaataaaagtcctcaaattccagggtgatcacccttccttctttgtcatggtcctcaatgccgatcccccgggtcacacacaggggctcctgtttcgtaaagacagccgtccctgagtagcctctgcggctggcataattccaatattgataatatccggggaagtccagcttcacctggttttcctggcactttgtttcctgaagacagaagatatctgcatccagactgcggaaggtatcctcaaagcccttcgtaatgcatgcgcggattccattcacattccacgaaattaatttcattccatctttctccttgtttctttttgttgtaacagctcttcgtagcacagtttctgcatttcctcatacacatctccctcccggaaggccggtgtcatgagaatgagcatatcgctggccaaaagctgggtgtttccttttgggataaactcttttccgccccgctttaaagccacaatgaggcattccgggggaagctggatatcttttacttttttattggcagctatggaaccgtggcggatgacaaattccataaggatgcgctccccggatgtggggccctcctccttgccgcagcgcttcagcagactgcccagcaggctttcatagattggttcggattttaacagggtggtcacaatgtaggccacaacggaaataatggacagagagagcatctggctcaccgatccggtcatttcaaatataagaatgatccccgtaagaggagcccggacgatggcagtaaaaaagccggccatggccaaaaggacaaagttgttcacattgtcaagactcattccaaaatactgcacgccgatcatgccgaaagcgcctccaatgagagagcccagcaccagcaaagggaagaaaatgcctcccggtgccccggatccaaagctgatcacagaaaacagaaattttcccaccaacagcagcaggatcacagacagggtccacttgtggctggtgagatccatgaccatctcatggccgctgcccaaaagcaccgggcaggtaaatcccacgatccctgccagcaggaacggaacaaacagtcttgtcaccgtattgagatgctttgccttctgaaaccaggcctgcaccgtcatggtaaccttattgtacaccgcccccaaaataccaaggatgatccccaggaccaccaaagcccagtacaggttttccggcagctcatagccaatgctgaactggaacactggttcaaatcccagaatgttggaggacacaaaatccgccaccaaagaggcgctcatcacagagagcagcacagatacggagaaatttttatgaacctcctccagggaaaacatcacacctgccaacggggcgtgaaacgcagcggacaagccggcgctggctccacaggtgagcagaaatttctcttccgtgatccctcttttcgtcagtctggaaaatccctttcctgccatggcccccagctggatggacggaccctcccggcccagagacagacctgccaatagggacaaaaatcctccggcgaacttggcgcacagcaccttccaccagcattgatccaattttccgatcatctctccctcaagctgagggataccgctgccggagatcatgggctcccatttcaccagaaatccaacaatggctgccagccccagcaggatcgcaaaccaggccagcactgtaaaaggggattgtttcataaaatccagaattttcaggagccattctcctgcatattttaaagcgatgcggtaaaacagacagaccagaccactgacgattccgatgaggatgccctcaccgatgagagccacctgaaactgttctgcccgcttcaatgtataggatgtgttttttttcacgatgccattccctcctcaattgagcatcaggttaactttattatacgtgcccatttgacaaattgcaaaaggtttctgtctctaaagcacacttctctgggaaaaggaggatatttttacagcatggttgcttttttttgaattttctgttacactttaggtatcctaagaaaagtgaggagactatatgagcgataatgaaaatttaaaggatggctgcggttcagcaggctgcagcgccagcgactgtgcttcctgcggttgtgactgcggcagctccggtcagatccccagtaccattactctgacaatggaggatgatacggaggttacctgtgcgatcattactgtttttccagtagatgacaaggaatatattgcggttcttcctgttgatgataatggccagccaatcagccctgaggtgtatttatacaaattcaccagaactcaggagggtgatcccatgcttgacaacattgacgatgacgcagagtatgaggctgccgcggaaatgttcaacaaggtgctggacaaggcaaaggaagacgagaaaaataacgtccccatttagtcagggatataggaacagcagacacaaaggagaaggacgggcatggttttcataaaccagtgtccgtcctttttacatgctttgttcctattaaaattaaaagcctattgctgagagatttgcccgttgttaggaaaggctcgggatctccacagcaggatctacatcctggctgtaatccacattctcataaccaaagccaaacatatggtaaaagtcatcccaatatcccttcagatcacagtacgtctccaaattatctgagtccacctgtttccaggcttccttgatcttttcctggacttgttccttcagttcccagtcatccatgcggatccagccgttttcatccacaggtactgcctctcctccatagagcttttgagtgaacaggcggctgatctgttcaatacatccctcatgggttccctgttccttcatgaccttgtacaaaatggtgaaatacagcggaacaacgggaatagcggagcttgcctgagttaccaggcccttgttaacggaaatgtaggcaggcacctggggatgggcctgatgaatttccctggcggttttgtggagatgcttcttggctacgccgatggtcccatcataatagatgggataggtgagggcgggacctatataagagtaggcaactgtcactgcctgatcagacagcaggttttcccggcacagaaggtctatccactgggcccagtcctctcctcccataacctttaccgtaccctccagctcttcctgggtggccggctcaatggtccgcttaccaatctgattgcagcgcaggtccagatttttctctgtgaaggctttctgggtggtttttagtacagaattccacaccgttccctcctggtccgtccgtctgggagcagccagagaatataccaccagatccacctggcccagatctttttttatgatctccatggtctgttctttcacttccctggaaaaagcatcgccattgatgcttctggcataatgtccctgctctttagccagcttttcaaaagcggctgtattgtaccagccggctgtggcagttcttttgcctcctgccggcctttcaaacataatccccagggtgtctgctccccaattcaccatggcgctgatgcgggatgccaggccatatccagtggacgctccgataaccaggactctcttaggcccatccacagttcctctggctgccgcagcctctgcctggcggcggacactctcttggcaccctgtggggtgagcggtggtgcagatatattcccggacttttggttctataatcatttggattcctccctaattccttcacttttcgaatttaattactttgattctcaaactattttaccataaaaataatagaatgcaagagatttttaagttttttatagataacaaagcggacaagcccgcttcaactccccctcccctcactcatgaggggcttggcagctttgtgcgccaatgtgcagctgcgaagcagctttcctatgtaataaaacaaagaacgggcatctctgcccgctcctgatctctgctgtcttattttccggtggtgctgcccagtccgccgtttcttgtatccgtcacatcgtcgtcaaaggtaatgccgtactccacgaaaatcccctgcataaagccggttcccatggagatctctacggtctttccctcattgctgtcattggtgagttttgcaaaaatatggccttcgttgtcagagttatagtaatcactgtcaatgatccccaccgtattatttaactgaagccggaatttaaaacccaggccgcttcggggatagcacttcagcacccagtcctgattcatctccacccggatccctgtggggatctttatggtttccccggggtttaaggtaacatccacaggggcaaagaagtcataacctgcgctccctgcagtagccctgcggggcagacggattctctggtaaatatccagaatttcctggctgtctgtctctccaaaggtgtctttccaatcctgcagaaattgttctgtacttactttatgaaactgtcctactcgcttcatggtgtgctcctattccacatgtaaaattacttttccactgtgcagacttttctgcacatcaatgactctctggttgctgctgcctttccatttcagggccagctcttttttgtccgcctgaaattcaccgtccaccagcacatccacatagcgcacgacctcttcttggcagatttcctcccagagagctcctgtatagagccagatggtcttgttggggtatttttctttaatctccttggcaagagaggtcacgctggtcacattggccggatgcatagggtctcccccagaaaacgtaattccgctgatgtaatctttgtctaattctgcgaaaatctcctgtctttcagcttcaccgaaaggaaggcctccgttggggtcccaggtcaccggattctggcagtctgcacagcagtggctgcaaccagcggtccagagcacgactctcaggccatccccgttgagcatatcgtcctttgttatattgtgatatctcatttttcaaccaaatccttatgcctgtgccggaacatccttcatggagaagctcattctgcccattttgtcctttccaagacagatgaccttcaccttgtcacccagagtgaggacatcctccacccggttgatgcgctccttggagattttagaaatgtggaccattccttcttttccgggagcaaactcaatgaatgcgccgaactctttgatgcttacaacttttcctgtgaagatctggcctgcctcaaagtctgtggtgatgatcttcaccatacgggcagcctcatccatctgcttctggtcaacgccgcagatagacacaaaaccgtcatcattaatatcgatcttcacttctgttctctcaataattgtattgatggtcttgcctctctggcctaccacatcaccgatcttctgaggatcgatctgaagctggatgatctttggtgcataggttccaactgtggagcgggggccggcaatgcatttctccatcacctctgtgaggatgtattctcttgcctcttttgtcttggcaatggcttcctctacaatgggtctggtgaggccatgaatcttaatatccatctgaatggcagtgatcccgtcatgggtacctgccactttaaagtccatatctccgaagaaatcctccagtccctggatatctgtgagaacgatgtagtcatcgtctgtgtcccctgtgacaagtccgcaggaaataccagccactggtttcttaatgggcacgcctgctgccatcagagacatggtggaagcacagatactggcctgtgaagtagagccgttggattcaaaggtctcggatacagtacggatggcataagggaattcttcctctgtgggaagtaccggaaccaatgctctctctgcaagagcaccatggccgatctcacggcgtcccggtcctctggagggtttggtctctcctacagagtaggacgggaagttatagtggtgcatatatctcttggaagtctcaaactcgtccaggccatccagacgctgggcatctgaaagaggtgccagtgtggtgatggtacagatctgcgtctgtcctctggtaaacatagcagaaccatgaactctgggtataatgtccacctctgctgccagaggacggatctgggtgatggctcttccgtcgggacgcttgtggtctctcaggatcatcttgcgcacggtctttttctggtactggtatacagcctctcccagaacagccagccaatcttctttgtctgtaaatgcttcctttaatttatcggtaatttcactgatatttctctcacgggtctgtttgtcatcagtaaatacagcaacctccatctcttcaggggttacgatctccttgatggcctggaataattcttccggcacagcacaggattcgtaggtgtgcttttctttgccgcactcagccacgatctggtcaataaatttgatgatctctttatttacctcatgggccagataaatagcctcaaccattttgtcttccggaatctcgttggcgccggcctcgatcatgatcaccttttctctggtggaagccacggtgagctgtaagtcagacacatccttctgggacagagtggggttgacgataaattcaccgttgatcatgcccacctgtgtggttgcacaggggccgtcaaagggaatgtctgaaatgctggtggcaatggctgagcccagcatagcgggaatctcagggttacattctggatccacggacattaccatgttgttcaaagtcacatcattgcggtaatcctttggaaacagaggacgcatggggcggtcgatgacacgggaggtgaggatggcatgctcggttgcctttccctctcttttattaaagccgccgggaattttcccaactgcatacattttctcttcatattccacgcttaaggggaagaaatcaattccctctcttggctccttagaggctgtcgcggtggacagcactgtggtgtctccataatgcatcagtgcagcgccgttggcctgttttgccacccggtcgatgtcaacggtcagagttctgcccgccagttccatagaaaaacttttgtacatatttttttctccttttttattttcacatatttgtaacagaagtccgaaacaactgaaaaagatattttacaaatacccttttcagtagtctcggaaataacttctgttataatttcatttactggatttttagggacattaaaaggatggggcggatggtcacatccgccccccaatccgcatactaattattttctcagtcctaatttctcaatcagtgcacggtatctttcaatgtctgttttcttcaggtaagctaacaggccacgtctctgaccaaccattttcagaagtcctcttctggaatgatgatctttgtgatgtgtctgtaaatgctcagtaagctcctgaattctggctgtaagaactgcaacctgtacttccggtgaacctgtgtcaccctcgcttcttgcatattctttcatgatggctgttttcttttcttttgaaatcattgtgatttcctccttagattattattcatgaccgccgcgtattaagagagggtcggagtctcctttctccggatacgggctaagctcacacttggtaagtatagcacacccgccacattctgtaaacaattttttccctgaaaaactgctcaaaattacctgccggcagcctgcgctctttgctccttctgctgttcaatgggatcatcgtccaggagggaaaaagcaatgttggtggcatggtctgccacacgctccagaccggacacaatatcggaaaacatcatgcctgcgcttgcggtgcactcgtttctggtgagacgctgtacgtgggattcctgaagctctctctcggtctcatccacctgatcctccagatccagaatctcctgcatatgttcctggttgttatgggaaaacatatccagggcataggtggtgatcttgatcaccatatccagcatgccggacagctccctcttggcctggtcgctgaaatccagctgctgggcccttctggactgggcggcatctgcaatgttctccgcatggtccccgatacgctcaatatcattcaccacatggaacagtccgccgatgctcttggcatcatctgcaggcagggtggtctgattgatcttcaccagataatccgtaatggcgtgattgagaaaatcaatacggtgctccacctcgtaaacctcattaatgtcttcctcatccaaggtgatcagcgcattcatggcccgctccagattggtgatggccatatggcccatgcgctccatctcccttgtggcatcaaagactgccgtagtgggagaaaataccgatttctctccaatatattgaagctggaattcctgctccggagtcttttcctctccccgcacaaagtagccggtgagttttacgatctgcttgataaacggagccaggagcaccacctccacgatcttaatgatcgtatgggcatttgccacctcacggcccggattgcttccggagactgcctggataaagcctgtgatgggttccagagcaatggaaagggcaatatacatgatcactgtaccgataatattaaatagcaggtggatcagggccgcccgcttggcatcccgcttaccgttcaagccggccagcatggcagatacacaggcgccgatattacagcccaggataatgaacaggcagatgcggatatccaaaaggccctgatttgccaaaagcaggacaataccaactgccgcggaggagctctgaagaactgccgtcaccacaacacccaccagcatagccacaaagtgattagacagtgagctcatgatgtccactacctgaggagaatctctgagcactgacatggaggaggacatggtgttcattcccataaagagcacaccaaatcccagaagcacctctcccattctctgaaccttagttttcttgcaaaacattaccataaccacaccaaccataacaatggccggcgccagcgctgataaattaaacgagatcagctgggaggtgaccgtggtaccgatgttggcccccatgatcactccagccgcctggtaaagattcatcagaccggaatttacgaaactgactgtcataacggttgccgctgaggaggactggataatggcggtaaaaatcgttcccaccaaaataccccttaagggcgtcctggtaaacatctccaaaatgctccgcatcttggcgccagccaccttctccagggaatcgctcatcagcttcataccaaacaaaaagaggcccaaacctcccattaatcctagaattatatcagccattcttatctcttctccttgcgtactttaactttccatcatctttccttaggaaaacctatctatcactccatgggaaacaggtctatttcccaaaatacgcttttcccttggcgatatccttcatcagctgcttcttaagttcttccagtgaagggaattcctgctcgggacgcagaaatttcaaaaattccactgaagagatctccccatatagattttcattgcagtccagcagataggactcaactcctaaaaagctctccccgcccacagtgggcttataccccacgttggtgatcccctgaaatttccgctttccaaaagtggaaatggtgagataaacaccattgggaggcatgagcttttccctcgggggcaccagattggcggtgggcatcagcttgcggtgtcccagcccccttccatggagcacttcccctgtagtatagaagttactgcctaaaagctgtgcgattttctccatatttccttcatttagctgttcgcgaatataagtactgctgatctttctggtgccgtccatctccttaggcacaacatccaccacaaagtccagctcttttcccatgttttccagaagagccacatttcccttccgcaaaaagccgaaacgaaaatcctctcccaccaccaccctggcggcacggagccgttccaccaggatctcccggacaaaggcttctgcactcatgcgcttcagccgttcatccaggggacattctgccagaaagtcaatgcctgcagactccagccggtctcttcgctcctgtcgtgtgagaagcatctgtctggaaacatcaaaaataaaaacaagggaaacaaaaccctgctttttttcttttaaaacctgttcaattaatttttgatggcctctgtgaagcccgtcaaactttcccagtgtcaccacgcttctgtctgttccaggcagcggggtgttcacatcaatgtctctcattaccattgctcctgcctaatagaacattttaacgggaaaatacatcttctgttcttccctgtaacggaaaattcccacaaaggctcctgaactgtcgcacattcgtaccggctccttcaccagagaaccacataacagtcctggccccagcggatttccattatgtaaaagccggtccccctgaggcttgcataaaactcttggatatctgccgaaaaccgtctcgatccccaccagcttctcttgaatggaccctgcttttgcaaggccttcaatctgctccagagtcagcgcctgatccagggtaaaatcacccaccctggtgcgcaccagctcttccatggctccgccgcagcccagcttgtccccaatatcctggcacaaggtgcggatataggttcctttggaacaggttaccacaagccgcaccctgggcagctccatatttacaatacggatctcatagaaatgcaccggacgcgctgtgcgctccaccacaattccttccctggccagctcatagagctttttcccgttcacctttaaagctgagtacatgggcggtacctgcatctgttcgcccacaaagctttcgcagacgctttgcacctgctccctggtcacctgcacagggctctccttgagaatggtccctgtcatatcctgggtatctgtagttacccccagatgaaggagggcctcataggtcttctccttttctgtgagcagatccacaatccgggtggctcttcccacacatactggaagcacccccgtggcatcggggtccagagttcccgtgtgaccgattttcttttggtgaaggattcccctcaatttcgccaccacatcgtgggaggtgaatcctttttctttatgaacaatcagaactccatccatttagtctactcctcaaccagctgtttctcaatctgtgccgttaagttattgatcacatcatacatggaaccgtgcatatcgcagcctgccgcccgcatatggccgccgccgccgaaaaataccgcgatcttactcacatccaccttcccgttggaccggagggagactttgaaaaactgggtatcaaattcgtaaataaagatggctacctccacaccctgggtaaggcggagctggcacacaatgccgtccagatccgctccccccacgccgtagaagtccatgtctttgcggcgcatgtagcccacgatacactttccgtcctggagcatgatgctctcagccagaaccctgcccatgacctggttctggatataggttttttcgtaaaaggaatggtcaataatcttgctgaaattaaacccggttttcataagctctccggcaatccgcatggtttccggagaggtggaagaatactggaaaactccggtatcgtgaataattcctgtatagatggcagtcgcctcagcttccccgatcttgtcagggtccagaagggtatacaatacctctgaggcagagcttacttcccccacaatgtggttgatctgggcaaatcccggattgctcacatggtggtctatacacaccgtcatcctggcgttgtcgaaaagctctcccaccagtgccatacggtccttactgctcacatccaaggtcacaaataaatcatagaccttttctgagcaggtgtccacatccattttcacatcctccataccgtcaatataggaaaatacgtctcttggatgatccagaaaaatgtccacctgaagttctggataattgtgcctcagatacagatacagtcccatacaggaacccacgcagtcaccgtccggacgaatatgtcctccgatccccactgtcttcacattttccaggatttctgctatattcttcattccttgtcctcatcctccgtccccttaagagatgcttctttctttgcgatatcatcaattaatttcgacattgaaactccatattcaatggattcatccagaataaaacgaatctcgggagtgttgcgcaaattcaggttttttgccagctcacggcggataaagcccaccgcgctgtgcagtccggccatggtatctttcttggcctgttcatctcccagaacactgatataagccttacaggtttttagatcaggagcaacctccaccgccatgacggacgtcatggggtgaatccttgggtccttgatctctccccggataatgttgcttaattctctcagcacttccccatttaccctggtgtttttaatgctgttttttctcattctgctctactcctgtcatgttcccagactatcttggaacttctaccataatataggcctctacgcggtcttcctctttcacatcattaaaatctttaaatacaagaccacattcatatccggcctttacttctttcacatcatctttgaatctcttcagagatgccagctctccttcaaaaatctggtcctcctggcggaaaatacgaaccttgcagcttctctggaaaataccgtcaagcacataaccgcctgcgatggtacccacgccagatgccttgaaggtctgacgcacctctgcatggccgatgaccttttcctcgaaaacaggatccagcatgcccttcatggctgcttccacatcctcgatggcctgatagatgactctgtacagacgaaggtctacgccctcctgctccgccagctgttttgccatggtgtccggacggacattaaagccgatgacaatggcattggaggtggccgccaggctcacgtcagattcattgatggctccaacgccgccgtggatcaccttcaccacaacttcctcgttggaaagcttggtgaggctctgcttcactgcctccacagaaccctgcacatctgcttttacaataatgggcagctccttcaggtcactggcgtgaatctggtcaaacaaattgtccagagacagtttggcttttgtctcttccagaagtctggtcttattctcagagacaaaggctcctgcaaagttcttggcttctttatcactttcaaaggacatgaggatctcaccagcattgggcacatctcccagtcctaaaatctctaccggagtggaaggacctgcttccttcacacggcggcctttatcatccatcatggcccggaccttgccggagcaggcacctgctgcaataaagtctcccacatgaagagttcccttctgcaccagaatggtagccacagggccttttcctttgtcaagctgtgcttcgatgacaagtcctctggcctctctctttggattggctttcagctctgcaacctcagcagtgagaaggatcatttccagaagagtatcgatcccctctcctgaatgggctgatactggcacgaagatcgtgcttccgccccagtcttcaggaatgagctcatattcagaaagctcctgttttactctctccacattggcgcttggcttgtcaattttattgatggccacaataatctccacccctgctgccttggcatggctgatggcctccacagtctggggcatcacaccgtcgtctgcggccactacaagaactgcaatgtccgtggcattggctccacgcatacgcatggcagtaaatgcctcatggccaggtgtatccaggaaggtgatcttctgtccgttaatatttaccacataggcaccgatgtgctgggtgatgccgccggcttctccccttgtcacattggtgttacggatggcatccaaaagggaagtcttgccgtggtcaacatggcccatgacacacacaaccggaggacgggcaaccatcttggactcatcctcttcttcctctttcaggagctcttcgatcacatccaccttaacttcctgctctgcgataatatcataacccaaggcaatctcctgggctttttcaaaatcaatctcatggttcaccgtaaccaggatcccttccaggaacagcttcttcacaatgacagaaggctgcattttcatcttctccgcaagctcacggatggtcatcttctctggaagtgtgatctccttaacctctggtttcttctcttctggctttggcgctggtgtcagcttctggagagccttgggaaccttggactggggatggcgtcccccttggtttggacggcggctctgggtggtagtttcaaactccttgcgccctttgttcttattctctctgtcacgctctcttttgctgtctttggatgtctttgcgatctctgtgatcagcacctccggcgtatcactctttctgggtgccggacctctgccaccctgtcctggacgcattggacggttatctctggaggaatcctgtcctggacctctgccaccctgtcctggacctctgttcccctgtcccgggcgtccgccctggggtcctctcacaggtctgttcccgttgccgccgttctggggtcttgctccctgacggttatctggccgctgggaatctcctctttgagacggacggttatccgggcggtttccgcctccgttataacgtggattaggacgattctcgccccggctgtcactgctgcggttgttttgtccgccctgctggcttccctgctgtctgtaaccggttctgttcccggaaggtcttgtatcgttctgtctctggtcggaaggtcttgaggagggtctgttatctgtacgcacaggtgttcttgcgaacccctgctctctctgctctctcacaggtgccttgggggctgccgtctcctttacaggtgcttcttttactgccccttcgctcactgcaggcttttgtactctttcgtcctgcttcttcacatcccctgcaccctgtctctggacaggtcttttgtccgtctgctttttatctcttctgggctgctgtcctcttcctgcatcacttgcattctgcgcacggaagatacggatgatattttttttctttttgggagctgcggtgccctctttattttctgtttctgttttcgtttcttctggctttgacatctttgtcttatcctctgttttaggtgtctccaacttctctgcgtgctcctttcttgtcatagaaaatttttcttttatcattgccacctgattgtcttccagactgctcatatggcttttcagttcaattcctttacttttcataaaattcaatacatctttattttccctgccaagctccttggcaagctcatgtactcttattttagacatatttcctacctccttctgccttctgcccacatgcaagttccttcgtgatcgccacagaaaaattggcatccagcacggctaggcttgaccggaactctttccccattgctcttccaaggctctctttgtcgcccatgacatatatgggtacttcataaaattcacacatgttccggaatttcttctgggtattctgggaggcatcctttgcaaggataaccagataacccttaccgctttttactgccttttccgtagaaaattctccgcttgccgtctttccggctttggtagcaagaccaatcagagatagtacttttttatttatcaatagattctaactccctttccaggttctcataaacctcttcgggtatggtcactttcagggaacgctccaggcctttgctctttctggccttctcaaaacattcccgggaccggcacaaataggcgcctctgccgttttttctcccggtggggtccaacaggatatccccctcctcgtcacggatcacccgaatcatttctttcttattcttcatttccctgcagccggtacactggcgaacaggaaccttactctttgtcttcatattcagagctctcttcctctttctcgtcttccggctctacctgctcttcttcctgggatactggttcctcttggtaaaactcttcgctttcctcgtattcctcgtcctcatcttcctcgtattcatagaagtctccggcttctcttgcctgggtctcactcttgatgtcgattttgaagccggtgagacgggcagccaggcgggcgttctgtccttcctttccaattgccagagacagctggtaatcaggaactaccaccaaggctgtcttttcatccgggtccgccataacagcgataacctttgccggactgagtgcattttcaattaaaagggccggattctcatcccaattgatgatatcgatcttctctccccgcagttcactgaccacagctcccacacgggctccgttcatgcctacacaggctcctacaggatccacatcggggtcgttggaccaaacggcaatttttgtacgggagcctgcctcacgggcaatgctcttaatctccacagtaccgtcccggacctctgccacctctgattcaaacagccgtttcacaagtccaggatgggtgcgggacactaaaatacgcggtcccttggaggtatccttcacttccagaatatataccttgatacgttctgtgggctggaagacttctcccttcacctgttcattctcgcttagaatggcatccgcttttcccagattaatgctcacgtttttgcccatgacacgctgcacgataccggtaaccacttctttttccttaccatagtactggtcatagagcaccttgcgctcttcttctcttattttctggagaatgacgtttttcgcattctgggtggcgatccttccaaactccttggagtggatctctaccttcaccacatcccccagctgtgcattggtattgatcttctgggcatctatcagagagatctccatagccgggtcatccacaaattcaaccacggttctctctgcaaaaacattgaaatcgcaagtttctggatcaatgttgactttcacattgtctgcttttccaaaatgattcttgcatgcctggatcagggactgctcaatggctcccaataaagtatctttgctgatgcttttttctttttccaggatatccaatgcttccattaactctctgttcatttttctcttttcctcctaaaattatctgcgaataggcagccgcatattcgcgatgcgtctcgctcacccacaacctggcgctacatcggctgcctgtcagggcccttgcctgatgaggttaaaaaatcactgctaaacgtatcagtgcgatctcttttttatcaaaaatccgctccgtaccctcttcctcctgaattgtcacactgttattatcatatgcacaaaggaccccataaaactctttttgtttgtcaatgggccggtaggtacgcacttccagtaattttcccatacttctttcaaaatccttctcctttttcaaaggccggtcaagacctggggaactgatctccatcacataactgtcctcaataaagtcatcctcatccagcttgtcgctgaacgcccggctgaccgcctcacagtcattcaccgtaattccaccgggtttatcaatgtaaccccgcagataccaggtgccggcctccttcacatactccacatccaccagctcaaatccgttggcctggacaatggggatcagcagggcctctgcctttttctcatattcttctcgtctgctcatttattcaccgccttaaaaaaatatctcatacatgtaataagagtgggcttctggcccactcttatgttatcgattatcaagttttctctattttagcaccaaaatgctggaaatgcaaggtctttccataaaaaaacggatttccggcaggttaggccctgctttttgtcccttttgtatcccttttggcaagcttgagacggttcagaacaatggtgcgctccttataagaaacactgtattctgtatggttttccaacagatacgcagcctccaggctgtccttttcacctaatcgcattcctctcaccccgatggcgctttttttcttgtcaggtatttcatttttcagaaatttcaagaaaaatccggccttgctctgaagaaccacatattccatctcatcggcaaaacccacaaagatcagacggtctccctctcccagcttcgttgccccgatggtgcgcttggccacatcaaattccgcgccctccacctgcttgcacatagctgcgccagtgacaaacaaaagcttatgtcccagaatctctgtcatgggctgcacaaagagaatctgttcctctgcactggaataattgctgagattgtcaataggggttcccttgtcccggaaccgcacaagaggaatgtccatcaccttcaccgcatgcattttcccctggtctgtaaaaatacagatcttatctgtattcatacacctgcacagatatttgctctcactgtgggcagcgtctttattgcgctcataggtattcttgtcaatggtcctggcatacccaaaacggtccataaggaaaaccacctccatctcctcgatcttcttttcctcatacaccgcctcctgggcattttcaataacggttctgcgcttattgccgaactgcttctttacgctgtccagctcatccatgatcacctttgccatggaatcatagttatttaaaatgtcttcatagcgggcaatgttcttcatcgtctcctcatgctctttcctaagagcatcgatctccagaccgatgagcttgtacagacgcatttccagaatggctgtggcctggcgctctgtgaaacgcaggcggcaggcctccttctggctcttctggcttttgaatcgaataccttctgtcactccgttcaccagacaatttttcacctgggcctggctcttgctgcctcttaagatctctatgatcagatcaatgacatcgcaggctttgatgagcccctcctggacctcctggcgttccttttcttttgcaagaagggtgctgtactttctgttggccacctcaaactgaaaattcacgtgatattcaatcacctgcttcagattcagggtctccgggcggccgtctgccactgccagcatattcacaccaaaggtatcctccaggcgggtctttttatacagaagattggtgaggttctccacgtccgcatcccgccgcagctccagcacaatgcggatgccgtccttggaggactggttggagatatccacaatatccgtagtctttttattttccaccagggcagccacatcattaagaaacttgccgatattggctcccagcatggtataggggatctgtgtgatcaccagatacagctttcctgcttttcccttctccacctccacctttcccctaaggcggagctttcccacaccggtctcgtagatttgaagcaggtcgtctttatttacaacaaggcctcctgtggggaaatccgggcctttgatataccgcatcaggccctttacagaaatatcattgttctgcatgtaagcctttactccatccaccacctccccaagattgtgggtggggatactggtggccatacctacagcaattccctctgcgccgttcaccagcagattggggatcttcaccggaagaacctccggctccttctctgtctcgtcaaaattgggcacaaaatccaccacatttttatccaaatctgccaggaatacatcctgggtgagcttttccagacgagcctctgtataacgcatagccgcggccccgtctccttctatggagccaaaatttccgtggccgtccacaagggtttttccctttttaaagtcctgggccatgaccaccaaagcttcgtaaatggagctgtccccgtgaggatggtatttacccatagtatcccccacaatacgggcacattttcgatacggccggtcatagcggatgcccagctcgtacatatcatagagggttcttctctgcactggctttaagccgtcccttacatccggcagggcacgggccacaatgacgctcatggcataatcgatataggatttctgcataacctccgcatagtctgtgcggataatattttcttctttcattttcatgttccccatcctcccttagtcaatcggttatatatccagctccgcattgggagcattttcatagataaactgttttctggggggaacctcactgcccataaggatctcggtcacactggaggccaggcgggcgtcctcgatctccacccgtttaagcattctggtctgaggattcagagttgtctcccaaagctgctgggcatccatctctcccagacctttgtatctctgaagcgtaaagcttcccggcttgtgggtcttacggtaccgctccagagccttgtcatcatagagatactcttcggctcccttcttgggcattgccttgtaaagaggaggcatggcaatgtacacatggccctcatagatcagctctggcataaaccgatagaaaagggtgagaagcaaggtggaaatatgggcgccgtccacgtctgcatccgccatgataatgatcttatcgtaccgcagctttgtaatgtcaaaatcatttccatatccttcagaaaaaccgcatccaaaagcattgatcatggtcttgatctctgcgttggccaaaaccttgtcaatggtggctttctccacattgaggatttttccccggatgggaagaatggcctggtaatttctgtccctggccgtcttggcagagccgccggcagaatctccctccacaatgaaaatctcacagatggaagggtccttcttctcacagttggccagttttccgttggagtcaaaggaatacttctgttttgttaaaagattggtcttggcccgctcctcggtctttcggatcttggctgccttctccgcgcaggagagaactgcctttaagatatccagattccggtcaaaatacaggaccatctgctcacccaccacttttcctgtggcccgggcagcatcctggttgtccagctttgtcttggtctgtccctcaaatctggggtccggatgcttgatggacaccaccgcggtcattccgtttctaatatccgctcctgtaaaatttgggtctttatccttgagaacccccagctctctggcataggtattcatcacattggtaaaggtagacttaaatcctgtaagatgggcgcctccctctgcattataaatattgttgcaaaagccaagaacgttctcatggaattcattggtgaactgaaaagccgcctctacctgaatcccctcagcctctcccttcaggtaaaccggctcatggatcacttctgtgctcttgttcaggtcctttatgtaccctacgatcccgtccggctcatggtattccataatctccggtgtctctccccgcctgtcctcaaaaagtatggtgagcaggggatttaaataagctgtctcatggagtctgctcttcacctctgtagcggaaaaccgggttttctcaaaaatctccgggtccggcaggaaattgatgcaggtgcctgtctccttggtcctcccaatcttgggaagcaggccgtcctccagctccagggccggaattccacgttcatagtgatcgtggtgaatgtagccctcacggctcaccttcacatccagataggtggataaggcattcaccaccgaagaacccacgccgtgaagtccgccgctggtcttgtacgcagaatcatcgaactttcctcctgcatgaagggtggtgaacaccagccgctccgctgacattcccttttcatgcatatcaaccggaattcccctcccgttgtcatttaccgtacaggagccgtccttttccaaaatcacatggatatggctgcagtatcctgccagatgctcatccaccgcattgtccacaatctcatatataagatgattcagtccctttctggtaacacttccgatatacatgccagggcgttttctcaccgcctcaagcccttctaatacggagatactccccgcatcgtaggtatccttttttgccatgatgctgcctcattccttcctagtttggataaaaaaataatcagaacgcaagttctgattactcttttaatcactctataatttttatagcagccagtacgggaatcgaacccgtgtttccgccgtgagagggcggcgtcttaaccccttgaccaactggccacgccttagcgacttgcttataatactatatttttttcaaagatgcaagagtttttttgaaaaaaattaaaaaaattttccaagtggttacaatctgtataaacggatgtgggaggacaaggaagattacctgttgttccttgaagacagctcaataccgccaacgaataatgcagcagaaaaacctaatctagcataacgttcatagatcgaagcatccgagattgttccaatcgaccagcatagaatctttatctgtaattctctctcattgttataaacacgaactctttaatcgtctcaaaaatttccgaaacatcgtcttattccaatactgcatcaccacattacgccttatcccctgtaaagtccagggtgatctcataaaacgcctcatccctgaccaccttgcagctcccgtgcattttttccatcatctgctcaatattcagcacccccacatgggtgctttccactccatccggatttacccgcactcgatttgtgaacttcagcagaacatgcctgtcctcatgcgcttcctcctgtccttgcctgcattccagcgaaattctcacaggctcccctggatccgcatactttaccaaattagaagccacattgtccaggatccggtccatatactcagaaagcactgcaatctttatctggggccaggataaacagcagtccacagaaaatccctggctttccaaaaacatcagcagatccgacagccggctctccagcacatatttcacactgacagcaggctccaaaaccagggcctcttcctttacaatataaaaccgttcaaaaagctggtcggacatctgcttgatctggtttgccttccgggcggtttttttcaagtataactccatctctttttcatccttgtattttctctgggagagaagctctgtatagaggagcaaggaggtaagtggtgtgcgcagatcatgggccatgcctgtgaccagactgttgttcgcatttatgagctcctccttctccctgatgttggcatttaaacggatccgcatctgttccaggccataggccagctccgccaattcatcactgccttttaccaggatctgtttatccattcctcccccttccagaattttcacctcactttccagattacgcacatatttgatcttcctctgaaggaaaacaagaaaaatcgtgagaaataccaaaattgccacacccaatgaaacataattggcaaactgatagaactgataatcaaaaagccctactaaataaagtcttcctgttccgtcaggaaaggtaatctcataatgcttggtttcatcaccatagtaataagaatcctctgccacaccggcaccttgtacactgtccaccacaacttcctgttccgcttccggaatatcaatgccataataggaatcgtaggtaaccctgccgtccttaaccactgtataatagaccagcagatgtttctttccccacttggccagcccctgaacatcatcggatactatcccatagtctgtcacatactcctgaaattcctgtgctgccttgtctgttaggcggtcaatgtacacagaagactgaaaataagaatccagaaaataataggcgctgttgtttatcacataataaaccagtacagaaactgccatggctgccagcaggaccagtgtagctttcatctttaagctaaatcttcttttatacaaaagtatacccctttccccataccgtacgaatatgccggggctcctgaggattttcctcgattttcacccgcagtttgcggatatggaccataaccgtactgttggaagaatagaaatatggctccttccatatactctcatacagattctgggcagaaaacactttggagggatgctccatcatcaggagcaggattttgtattccaaatcggataaatccacactggctccctccacctggacctcattaaattttctattgatccggatgccgtcaatttcaatacattcctctggctgctccgtgagcggctttccactgtatacacggtagcggcgcagcagcgccttcacccgtcccaaaagctcagaataggagaagggttttcccagatagtcatctcctcctgccattaagccgatcaatttatcagattcctgggctttggcggtgaggaacaagacgggaacataagacaccttgcgaatctcctcacaggttttcaggcctgaaatcccaggcatcatcacatccagaattaccaagtctgtctcatcattcagaaacttcagcccctggcttccattctctgcctcctgaactgcataattttcactttccagcaaaatgcggattccttcacggatatctgcatcatcttctattattaaaatattggccttgctcatggtaccccccattgcttactttatatccagcctttttctctatttctctgctatcataccacagtttcttttctgccgccatcccctaacctttcatggcctccagggcggaaatcttcacagccttattggcagggtaatatccggccgccacaccgatggaaacagaaaaggccagggcaaagccagccagccaaagagggatcacagacatggcacccccagtcgcgctcatcatatccattcccattcccatcatctcaccgtccacgccgctgccagacgatgccgaaaaagaattcatcccccaggagatcccatagctgaggaaaattcccacggtgcctccgataaatccaatggcagcggcttccataagaaattccttccggatatctgtcagaaaacacccaagggctttcataattccgatctctctggtgcgctcagtgatggacatgatcatagtattggcgattccaatagcggccacaagcagggataccgcgccaaggcctgcaagcatcagctgtttctgccgggcctccttttccatgggtttacgtatactctccatagaaaaggtctggtatccaagcccacgaatttggttctccgccgcctcaactgcttggatatctcccacatttacaagaacctgtgtatattccttggacttcttctggccagctatcttctgtacctgcctctgaagcttctccagatcatttaaccgcatgatcaaccccatgctggtctcctcacctgcatcatagttttcatccacctgtcccactaccgttagcttttgtacctctttccactgtacatttcccgctgctgctgtctttccttcctcaccgggtccaggctgcttttcctttttctgggatatggaaatttctgcatccatagcatcaaaaaacggatcctttacatcagttccccaatactccaccatattttttccctccggtcttttgctgtccataaactggtaggaaaaatactttcctgccagtacctgaaagggtctggtgggaaattttccatccagcagcttataacccatgttttcaaaatctttttctgacacacccatgatggtcaccccagccccctgatagcggttctgctccccagtagtaagctgcagtgatcccagatccagacttttttttacgatgacagaggtgactccaggaagcccttccatctgtttcactgcttttttatcaagaagggttttatttgcactcttggatggcgagggcataactgtgatcctggtaagacttcccatctgcgccagcatctgttcctgggactccttcattccaattcccagggaaaccatgatcacaatggcgcagcagccgatgacaacgccggatacagtcaaaaccgttctaccttttcttctatataagtttttcagacacattttaaaaatatccataaatgacattataaactctccttatcctccagaagcagctgtctttttttccgtctgcggcgcctaaaaaaaacaagtagtaaaatacatacaacggcagcggcaggaacaacaatcttcagatgcagctggtctgttgaaacaacctcttgagccaggtccgttccttcttcagtgccgtaaaacatagcatccatctccggctcaccttctgttacattgagcttgatctgcttttctatggtttttacatttcccgctgcatcctcataggtgacagaaatcttcgcctgctgttcccctgcctgttccggggtcacaaaaaaatcaatggtcccgctgctccctggctccacatttcctaaaaatttataggtttcttcactggtcatttctgtttccatatgagcttccacattgtatatgatggatttccccttattcacatagggaatggtaagggaagtttcctcctttgcaaggctctcattttccttctgaatatctccgatgctgaatttgtctggctgtacaaaaccaatggtcaatttttctgtggaggtcacctgagccctttcctcctgcttcaaatattcgtatttaaaattcatctccaattttgcattctccgcctgtccctggggaagcaccttcagccttaggatttttgtaacggattcctggggctgcattctctctatgtatgttgtattggaggaatccaaaatggacaatgcctccccggcttctatggacatgacaatattttcgatgacattgcgccggcttgtgttatagagcaccagctttagctggaattcctctcctgccttaatatttctgtcatactcatactggctgatgataacattgggagtcatagggtctatgtgttttttggaggtatttccggaatctcctccaccgccgcctccgaaaccgccagacacaccctcagagtcctgtggtgtctgtcctgcattgtctacaaactgcttctcatgatcccacacaatgggcagcaggatattcccctcttcctttccatcctggatctgcccgtctttcacataactataaaaagcgttcaccttcatcatcagggtgggggcttcaccggacagatctcctgcgatcagctccacctgtaccttcctttcttcccctggctgcagcgtatttatagcaatggtgtctgttttctgactgggatccagagaaattcctatgggcatcaccaactgcagctttacattttccagttttgcggactgggacctgtttttcaccagcaaggccacctggaatttttctctggatctcactccctctttcatttcctctctggagatcgcgattcccggctggtttgtatccggatcttctggcgccttggtgggttccgggggaatgggggtggccaaagccggtcccgtaggctcaggagggaggggtacaggcgtctcctgtgacggaggaattggttctgtgtccggcggtaccgggaccacttcctcctccacaggcgcatcatccttgggcgggacggcttcaaatacttcctccccgaacggattcccttccaccggggcagatacaaaagccccctgtcctgattggaccgttgctggcggaccctcttgtgtttggcctgattctgattcatccattcctgacagagaagccgcaaaagctatctcacctggaaaaaccgccaaatttcctgccaggattaaggataatgcactgagcaggaacctctttttcagatttttcatatgccttttcgttcctttctttcatcttttacaatatcaccgtctattaaagtgagaatccggtccgcataagccgccatttccggatcatgggtcaccagaacaatggtctgattatttttccgcgccatatccagtaccatttccatgatctgggccgttgttttcgtatccaggtttccggtgggctcatctgcaaacaccacctggggatttaccgcaaacgctctggcaatacccactctttgctgctgtcctccggacatctgggagggatagtgatgcagccgctttcccagtcccactttttccaaaagatacgctgcccgctcctcccgctctttgcgcctatatccctgaaacatcaaagggagggccgtattttctaatgctgtcatataaggcagcagattgtaagcctgaaagataaagccgatatgcttttgcctgaaagctgccatctgttcttctcccagctttgtaatatcaatcttattgatgaccacactgccctgggtgggcttttccatgccggccagctggtttaaaagagtgctctttcccgagccagaggtgccaaagatgcagcagatctcccctttttctatgacggcatcaattctattgagagctacaaccttctctgtgccgatacggtatacctttctcacattacaaatctttatcattgcttcccgcataattgttccctcgtccttatgaaaatctgtaagtattcctattaccttatcaactataaaggagaaatcttaacagattctgattcaattctaaaaaaatcttaactcccctctctccaattggaggacggccagaatatcttccagggaaatgcagccaacacccagaaaacagcagcgggaaatctctgcagacggatctgtaagtttttttgacaaatcctaagaaagtgtactagaatgttgtctatatggacgaaaggagaagcacatggatgaaagaccggattgatttacatgtccattcaaactgctctgatggaacgctgtccccttcagagctgctgaaactggcgaaaaagaaagaattaaaggccctggccctcactgatcacgataccacggacggaatccaggaggcacaggcggccggaaaagaactgggaattgaagtaattccaggaattgagttttccactcattacgaaaataaagatattcatattctgggacttgctatagatcatcacagccattatttccaggaacagttggagctgttccgtgactcccgctctgtacgcaaccggaaaatgacagacaagctccgggagcacggaatcgcgatctctcttgaggctatggaacaagaattccctgacagtgtatggaccagggctcactttgcccggtatctggaggaacacggatatgtgggctccaaaagagaagcctttgaccgctacttaggagaacgggccagctgctttgttcccagggaaaaggtcacaccttaccaggccataaagcttatccaccagtgcggcggttatgcggttctggcccatcccctcctctatggcatggggtaccaaagcctggaggcattggtgacaaagctaaaaaaagccggcctggacggccttgaggccatttattcctcaaaccgggcaggagaaacggctcagatgaagctgctggccgcccgccacggcctgaagatcactggaggttctgatttccacggagacaacaaacccaatctccagctggggattggctacggaaatctggatattccttacagcatatggaaaaacctgcagggatcataagccccctgaatttcttctgcccttaacaagcccgccttccagggtaaaaaggcaaaaaaacagaggagagggaaattatcttctctctcctcttttgctgcttccataaaaatcacccttcatccctggtctatcagctcacaatggaaatccccgcactggctcccagcctggaggctccagcctcgatcatggctgccgcatcctcataggtacggattccgccagatgccttcacacccatctcaggtcctactgtttttctcattaacgccacatctctggcagttgctcctcccgtggaaaaaccagttgaagtcttcacgaaatctgcccccgcctttttcgccgccaaacatgcctgtaccttttcctcatctgtcaaaagacaggtttctatgatcactttaactttggcttctcccttggctctcaccacagcctcaatatctttggccacagtctcccagtcaccagacttggctgctccgatgtgaatgaccatgtccagctcctgggcacctgccgccactgccagggcagcctctgatgccttggcctccgtcatcatggctcccaaaggaaaaccgatcacacagcaggcttttacccctgttcccttcagcctttctgccaccaatcctatccagcaggtatttacacacacagaggcaaactgatattctatagcctcctcacagattttttccacctgttcctttgttgcatctgccttcaaaatggtgtggtcaatatattttgccagctcttttttttcaatcataaaatcttctcctccttttcatccatatcgtcctccagttgagcgaccaccaccgctgtctcctctgtcaaatcgttaaaatcgtcattttctattttttcatctgtgatcactgtagtggcctgattaagctctgcaatttttgcaaaagaaacggaaccgatcttgctgctgtcacacagaacatacagttcataactacagtcaatgacctctcggatcttcagagcattgtttatatccggtatggtgatacccgcccttttatccacgccgttgcaggatataaaggtcttgtcaatattcatcagagacaaaagttcgcattttacaggggatgtcacataatgataaccctgcctgataattcccggaagcattataaccgtaaaatctgtattctgctccagccagtaagcaaataaaatatcgtttacgatgatggtgagtttctttctctccttcaatagctggaccagttcaaacactgtagtgctggtgatcatggccaccgtgtccccgtcctcaatatactccagcgcctttctggcaatggcctttttctcttcatgcatctttccctctttgatctgaggatggggttcaaaactagctttggtattgcttaccgctcctccgtgggttctggttatcagcttttcctcctgtaattcacgcaaatctttccttatggttgatgcagataccccaaaataatcgcaaagctccggaaccacgattttcttatttgtattcaccaactccaaaattttattttttctctccacactaaagatttgcatattttttatgagacatcccctttcctggttattctcctaaggtaatgactgctttcccgcccttcttattacataggaaagttcttagaactttcctatgtaataaaaaccctccgggggatgcacacaatgtgccagggaaagctgcttcgcagctgcacattggcgcacaaagctaccaagcccctcatgagtgaggggatggggagttgaagcgggcttgtccgctttgttctatcaataccatcggctgtttatctccataagtgcagctttaccccattaaatccttatttcttacataaagctctttaaatcgttcatactgctccctgtaaaccccggtattcttactgtcaggctgataaatcttcgggctgaaggttacgaatgaggcgcaggcttccttggcatccttgaaaatccctcttcccatcccggcgatgatacacgcccccagacaggcctgctccttcacctggctcactcgtacctccttctcaaaaatatccgcctggatctgcagccatacaggactggaagcccctccgccggaggagatcatatactctccctggattcccaggccctccactaaattcagagaatccttcagggaatacaccacgccctccataactgaacgcaccagatctcctctgtcctgctccagcttcaatccaaaaaacattccctgggccttaggattcatatgcggggtgcgttctcctgcaaggtagggcaggtaaatcactccccggcttccaggaacagagttctgtgccagagcgctcagcttggaaaaactctcctccaacaatatcttttctttcagccagcgaagtgacatcccgctggacaatgctgccccgaaaattgtatatgccctgttgataccgtggcagaaggtatgaagcctgagacccggatcataaaaatccttcgtggaataggcagagatctgtcctcctgttccaatgttgcagataatcccgccctccgacaccgccccattgcccacactttgggccggttggtctccgcatccaaaatatacgggagttcctgccttgagacctgtctgtctttcacattccctggtcaccgttcctgccagctcccaggcctcatgtatttccggaaatatattctccggcagctccatccgctttatgatcttccatgcccattctctgttcttctcatcacagatacaggcagaggatgcatcggaggcatccgtccctatttcccctgtcatgcggtaccggatgtaatccttaggcagcataatcttatggattttttcaaacagttcctttttttgattctttatccacataagggaaggaaaagcaaatccaggaaatacttgattatgaaagatctctcccatttcctcaaagcttacctttttcccgatctcatccacttccacctgggagcgctggtccatccatataatggcatctcccagcacctcccctgccttgtccaccattaccagcccatgcatctgtccggaaaagctaattccgcaaactgcctcaaagaccgcctggtgtgtttcctttaatttaccaagggccccgcaaagagccttccaccatgcctgtggcttctgctgtgcataacctgaacaaggaatgtccacaggatatccctgggcctgtactgtcataaaaccactgtctgtgtccaagagcatgaccttcacactagaggttcccagatcaatacccaatactactgccataccatcaccgcctgcttttatttattctcttcttcaaaggcagcttttatgacttcaagctccttcatcagttttctgctgctaccgtaccccaagcagtgcccattcctttacatatttcaatgccagctcccacctcttatccttgtctgacatctaaaattgcagggctagctggtatataagataccacttaatattctcatctttcttttacttctgattcttttttataatgagcaatatttctttttcatttcaatgattgtttagcaccgttattaattatttatcgctgttttgtaccgttatttggattgtatcattgttttttgtcatttgtcaatgctcctttttactataaatttcgtttcgtcattatcacgtctcattaacaacaagggaccatattttaccctctctgtgcattcaataccaaatgtacgccgtactctacataacatttcacctctatctgcgtaccataggatttatctagaaaggagttttcctattaaaaaagccccggttcacccgaggcatttattgctcttctttctttttctatatccagccagataaagagccagtatgataagtcccagtccgctcaaaagaaatcccagttctacatacgaattttcataccttaattcaatttgatgtgcccctctctccagatcacaggataaaaacatcagattcgtcctgtccaggcgctttcttttcccatctgcccacaaggtccagccagggctgtagggcacagagaacatcacacgtttgtcctcatccagccgaagtgttccttttatacggttcactccctggcttaaggagccatgaatcccttcccttaagcctttttcctgaactgatataagcttgtgcgcagccacatggattctcatatcatcaaaatgatatctgcctggatttggaaaaatcaaggtgatctttcctttggactgctccaccgttcccagactgcacacaaaatcatggcggtcacaatatccccctgccacctgtgggttctggatcaccagagtccttgctccgttttctccttctataataatttttctgggagccaggtctgcttccatggcagtccaagtattttgttccttcagcccttccatcctcatattttgaaagatcagctgcaattctcccttctcccctgcttcataagaaaacacagcttttgcgtttctatcccacaccctgatctcccgctccttaatctccacgccatcacaggactggagctgtaaatcccccggggcatgctctttcttttttcctcctaaatcccccttccagacagcatcggtatggtcaagaaccgcatattccagaatcactctctgccgttcttctatggtgagcttttcaaaatcctcactggagatcaccttgtccttatcataccctgacacaaagggaagctccctgtccgtggcgtaaaccttatacttacgccctcctgcaaggaaggtgtcaatttctttaaaacccatgggcacaaatttatttttttcccgggtcacataatattttactccaaacagcgcttccaaagtgcttctctggtccagtccgctgaaagaaaaatccaagggctccttaaaatacaacagacgctgaaactgtgtaatatacggacttaccatgctgaaataaaaggaaagaccgttcatcttggtctgaagccctgcattctttctctcaccagtaccaaactgttcataacgccacatctgagaatccccatagcgctttagccttacagcagggggattctccagactctcctgggttgtcccttttttcatatatttgtggtagctttcccgaagcacccaatgattttcagcagcacccacaagtaccagcacacaaaggacaggatacattgccctttgggcctttaatttcctccaaggaacagccagcaccagcaataaggtcagtgccagcccccctgcgtgaaataaggtatgcttccattcccaccctctctccacaatgtatctgcctgccgcaaaagcagcacagatcagccccagaaaacagcctgctgctataagaagccttttctctttcctggagatgcgctgcagctccggacagatgacaacaagaatataggacaccagcatggcataagcaaaacaccagcggttggttacgtaagaaaatccattcagaatatgtcctgcacagggaatacacaaaaaagcagtcaggagaagaaaacccgctttcaagtctcctcttctctttttcaaaaataatagtatcacacacagaaaagcagaggctgaaaatcccatcatacagttatagcccggactgtccacagaaataaaatctacaaacattttcccatagtattttaagctgtacaccaaaggtacataattctctgtctggaatcttccggtctgaatcaccagatggacggccggcgccaaagtacatccggctatggaaattccaataagggtataaacacaaaacgaggccaacagcctggccagcaccttccattgtattttcccataatagtggaaataccgaaaaactgcataaatgacagtgatcaaaccaagcatatagaaaaaataaaaactgctggctcctgccaacgcaatcataagtatatagaaaacggccttcttctccttcaataccttatccactcccagcaaaagcaagggcagataaatcatggggtttaaaaagaatggatggacagaaaaataattgatcccatattcagaaaaaacatacacaagcgctcccagaagcacaggaggatttgcattattatgatatctggcaaaaacagaaaagctgatgcctgccaaataaagcctgaaaataaaaagtccttcgtacaagatctccgtataagctttcggaaccacagcagcaagaagattaagtggatccccgatcacataaaactgcaaggtctcaataatatctgaaccatagccaatggaaaaatcaaacaggggtatattcaacgaatggtctataaagaccgttcttaaaacctcccgcagatactcaccataataagccagcgcattatagtgctgttcgatcccgtcattaagccagataagagagctcccattatgccagaaccacagaagaagcccccacattcctagaacgaagaataccgtatagcaggcataatatttgattctttcacttttctttatttccggcatactgataaaccgcctcttttcttcttgttttaacccatggccgataattttttcatgcctctgttcagtggttacagctagtatttctcaaccttgtctgttaaaatcaaattcacagactccggaatatgataaaacactttaaagaactcataatgtgtggtatctgctgccggagttccataccaaaggtaacgctcataaggaagatgattcaattcaatctctgttttcccgctgtgaacctgcaattgtattttctgaatcctgtactgatcagcctggtaatttcccagaaatacaaagaagtagaatgccaggcacacacaggcggccgtgcagaatcctttttccagaaaatgaaggacggattccatgcaattcaacaataaaagcttcaaaaagcttactgccataagaatatacaaaagataatgaatgaaaaagcatctgcttcccaccggatgaacaaaaaacaaaggtcctgttaaaacgcaaatgctgccgataagaaacataaatttaagcttgcacttaaaaatgctgcctgtagtaattgcaaatagaaatagcgctcctgcatatactgctgtgaaagcaccctccagcgctaaaagcaaatatgtctttcgttctgcatccaaacccgccacgctgacaaaactgtagatcccatatgccgcaatcaatagggcacagtttttcattatttttctgtatttgagagaaatgcccatgttgcaacatttatacgcaagaagaatacacagaattgccatggtcaaattcatccctatgttgtttaagaacaattctttgtagatcactcgtatgtaggttcgtccagcctgggaaagagggttatccgttgcaactgtcctgtaaaaatccctggactgagccacatttctatatgctgagttggaaaacatgacaacagcaccaagaagagtgcccgtcatataatacacacagcctttgtacacagttctttcctttatccatacagaaatcactaatgtcaccgacaaaagcaagtggtatactgtgatatgctccataaatagtgtattgacaatagccaggggtaaaagccacacactgctcttatctttcagcctgccaatatctcccgtttcaaaaaattcccaaaaataccagaatattatcaatgtcccaaaggcagatatgcaataatttgtaaaacccgaagtccatacaactgactgagccataagcgtcctgggcatcattgctgccaacaggcagataagagaaaaaaggaagctcttcccctctgctattttgttcatcaagaacaagattcccgaaaggacaatccccacggtcaatgccttgagaatcctggacctggttaaggccagtaccaataaattccctaaatatctgccattatacccgtcaaatatattttcaagcctctggattccccgataagatccccatatccagtcatccccggaatatggaaaaagataggctaaaacaatcatcataacaattataaacaacattttcgtattttttaatcgcaatattttgtacatacatagctttcctcattctatattaccgctgacaaattaccaccattgacctgaacatccccattggtatcaactctcatggcatttatataaagcaagttggagctatgctcgaaagagtatttgccacccctattctttgaaacttcaatgtgctgtctgctcccaaaacagcaggttgttttcaaatttaacagttattcttcctgtatctttcagccatgcaagataagaccgtactgtactgccaacaagaacatactgctcaaaattcatcgttaaatcatattccgtaaacagccgttgcaagatgatttcaaagcaaagcggctctttgcaaaggtcaataatcttttctgcaatttcatgtaccttatcaatgttgtattgagccaaaccggaaatatctgttgttacctgggcatgagctggaataaacatttttgcagttagggactttaccgtttccagcgtttttatgtacgcggccacatcatagataaatccaatctggtacttatccaacgtttcgcggctggacaggcaatcagccagataaacgacatcatcaggagtccgaaaccccaccatatcgaaaaaatgccccggcaaatggatgatttcaaatccatccggcaaaacatcttttgataaatattccgcatcactttcctgcgctagtaaaaacttgtgtcgaaggtctttgcaggggtagccgccatataaaaatgacggttctagaatagggtgctttgtaaaatcacaatcaattcccggtgcatagattttgcagcctgtctgtccttgcaaatatttgttccctccgatatggtccgcgttggaatgggtattataaatggctgccaatttccagtgattcgcgtccaggatttgccggacttttcgccccgcgtccttatcgtttccgctgtcgattaaacaaacttcttggtcattcagcctgacaagtccaattttagccggactttgaatataatagctgctgtctgcaacttgaatcagttcatacataatttccacctctcccacaatttcaatttgtcaaatacgccttatccgccaaagacgtataaagcaacgagttaactctatttgttcctgttgtctggcatagcaaaaaattttactatgccagacgcatttaactggtatttattatagcaccttgaatgtgtatcgtctactttgaaagcaatcaaaaggccagtgggattgtggttaccatttgtcaacggtaaagttcacttttaatttgtatttttcttgacatagtaccaggagctatttattatcattttaaggacaaggcggaaatggttgatgcggttttgccgtgtatgtttcataaaacgattccttgttataacgagattataagcaataaagaaatattttctttggaaaaaatcaggaaaattttaatcagtgcagtaacagctaaagaacaggttgaggtctattttccattatcaagatcattggccgataacccccaactttctgctgcccatatagattttacaaaaaataacttggtagagattttttgtacgttgatcaaagaaggaatggaggatggaagtataggagtaacggaacctgaaattccgccaaaaaggaaagtatagtaaaaaatttgaattcgaggtgaaattatggcatcaagcaaagaatatttggaatttattttagggcagttatccgaattagaagaaattacatatcgtgcaatgatgggagaatttattatctattatcgtggcaagattgtcggcggtatctatgatgatagattgcttgtcaaaccagtaaaatcagcaattcgttatatgccaacggttctgtatgagtcaccttatgagggagcaaaagaaatgttgttggtagacgaagttgataataaggaatttttgataggtttgtttaatgctatgtatgaggaattaccagtaccaaaaccgaaaaagaggaaataaacaaaccccagtttgcagagtcagtgctaaattagaacttgaattacaacaaaatatgacctcttaacagaggttataggttatcaataaaatcctccaaaagccttgaaaacaaaggatttatcgcaatgtgtccgccttatccctttatatgatttcacatagggaatatatacaaaacaggtaacaactaagtgaaaatttcaatgatattatgaatgcaactgacagttgacacattgcatggtgctgattggtagtgggcaacctggaaaaaagatagaatatacgcataacaatcacacaaggagggtatagttatgatttttgcagacaaattaacacagcttcgcaagaaagcaggttggtcacaagaagaattggctgaacaaatgaatgttacaaggcagtccgtttcaaaatgggaaggaactcaatcggttccagaccttgagaaaataatccgcctttcagagttgtttggtgtaagcacagactatttgcttaaagatgaaattgaagatgagaaatgtatcataccatctgatgaagtgtcaaagctaaggcgggtatctatggaagaagcaaacgcctttctttctgtcaaagcgacaacatcaaaatcaatagcattggcaacttttttgtgtattttatcacctatatgtctattcatattaggagcgatcagcgaagtttcaaaatatggtttgggagataatgtggctggaggaattggaatgattgttttacttcttcttgtcacaatagcagttgctttgtttatttcaagtggtagaaaaaccgcagcatatgattatttagaaaaagaaatttttgaaactgaatatggcgttagcggaatggtttcagaacggaaagcacaatacagcgaagtatatacaagaaataacataatcggcgctggtctttgtattatggcactcatccctctttttggaggagcgatttttaatgatgaaaatgaattactgctgacgattatgctttctgcttcttttgttattgtaggtattggtgtcgttttctttatccgtagcggaatcgtatgggcaagctatgaaaaacttttacaagagggcgattattcaaaggagaaaaagaaaaagcaatctgtcacaactactatttcggttgtatattggttaattgctactgcagtatatttaggatatagcctttctacaaataattggggatatagttgggttatttgggtagttgcggccgtagtattccctgtcattgttgcgatttctaatttgcttggtaaacacaaatgatgaaaacagaatagatatattttcctgtctgcggcaataaaacccgtacaatgatacaagaagatactgaaatgaaaattttggattttgaattaagaagatggactttcgaagttcccttaaatagaggcggacaacgtcctagaaaagagaatattatggaatagaaccatgtctttttggaagatgtgaaatatattaaaataaacttaaacatgacagacatatgtcatgtttgaaatgttaggatggatacagaaggcctttatataacggttatgaactgatcggaaaatgatattacaattcattgaaaaaatatcatcttaatttgcagcattgtaaatttgtaaaggagtaaaataagatgagcaaatatcacgcttttttgaaatacaaaaagaaatcttgtaaaggggaaaattaatcttatggagcttataaaaattacacatgaaaatattgagacagagcacatctgctgtgccatttcaaataataaagattgtcaggtgctttccaaaaaagcatggttgaaagagaggatagacgaaggactggtttttttgaaatgcaatgtccgggggaaatgttttattgaatatatccccgctgaatacgcctgggcgccagtttcggccgatagttatatgtatcttgactgcctgtgggtatccggacagtttaaaggacatgggtattcaactcttcttctggatgaatgcataagagacagtaaggaaaaaggaaaaaaaggacttgtgactttatcttcaaaaaagaagatgggattcctttcagatcccaaatatatgaaatacaaaggctttataacagcagatactgcaagcccctattttgagctgttgtatctgccttttgaaaaagatgccaagaggccttgtttcaactcttcggtaagagagacggaacatagaggcatgcagaatggttttacactgtattatacaagccaatgtccttttactgcaaagtatgttccccttcttgaagatatggcccaaaagaaaaatgtaaaattccaaacagtccatattaccacacgggaacaggcgcaaaatgctccgattccgtttacaacatttagtctgttttataatggccagtttctcactcatgagattcagtcggagaagaagtttgaaaaaattcttgctaggacggacacatgatcgaaggcggggaaggcggggaggacacaggatatggaagagggaatatctcttggcagaaaaattttgtgggtaaatcccccgaatcacctccatggtgattcaggggacttttgattttacatattttatatttcttgtctatgattcttccaaatttccaaccggctctgcaggtacgaatacccgtttcttatccggcgccttcttcagcgcctcagctttttcctgagcctcctggcagaacagctcctgggaatttacaagaaccttgcctcttttgtcctgtttttcataggttccgtctggctggagaatatgagccttcatattgtctttaaattccaggtccaggatatgcatgatctcttttttgatctctccatcctccaccgggaaaacgatctccactctccggtccagatttctgggcatccagtccgcactgcccatgtaaagctcctcggttccggcgttatggaaatagaaaatacggctgtgctccaggaaattccccacaatcgagcgcacctggatattctcgctgattcccgggatccccaccttcagacagcagattccccggatgagaaggtaaatcttcaccccacaggcagaagcataataaagggcagccatcaccaccggatcacacagagaattcatttttgccacaatataggcaggcaggccgtttttggcattttcagcttcctgctcgatcatttgaaggaagcggtccttcatccaaatgggggctaccaccagcttgttccattttctgggctctgaatagccggacagcatattaaacaccgccgtggcatcctcaccaaaacgctcgtcacaggtaaagattccgcagtctgtatatagctttgctgtggaatcattataatttcctgtggccagatgcacgtacctccggatcccggtctcctcccggcgcaccaccagggtgatcttgctgtgggtctttaatcccaccaggccgtagatcacatgacagccagctttttccagcatctttgcccacacaatgttgttctcctcatcaaagcgggcctttaattccaccagaacagacacctgctttccattctccgccgcctgggcaagagcagcgataataggtgaatttccacttacccggtaaagggtctgcttaattgccagcacctcgggatctctggctgcctggcggacaaagttcaccactgggtcaaagctcatataaggatgatgcaggaacacatctccttcccggatgacctggaaaacatccttatcattctggaacgcaggcaccaaagcaggggtatacttgggcgttttatatttttcaaagccctccaccccatagaccttcataaggaacgtcagatccagggggccattgatgaaaaaggtgtcctcatcttttatttcaaactctgtttttagaatcttcagcaggcgttcatccatcttctcttctgcttccagacggatcacctcaccccactggcgtttcttcaactgtttctgaatctccaccagcagatcctctgcctcgtcctcgtcaatggtcagatccgcattccgcatgatccggtaaggatgggcacacaccacgttgtagcttaagaacagcttaccaatattgcgctcaatgatctcctccagcaggatcaccgtgggttctccctccttctgggcagggatcatcaccactcttgggagaaccgagggcacctgtaccgtggcaaaaaccagcacttctttcccttttttcttatcttttttggagatcagggctccgatattcagggtcttattccggataaggggaaacggccgggaggagtccatggccatgggcgtaagcaccggatatacattgtcctcaaaatatcggtccacaaatttagcctggtccttagtaagattctcatgctctgtgatcacatgaagacccgtcttctccagggcaggaagcagggaccggttataggtactatactgggtgcgcaccagctcatgggtctgaccgctgatggctgtgagctgttccttgggggtgaggcctgcaatatccggtttctcgtactttgcatgtacctggtccttcaaggaggccactctcaccatataaaattcgtccaggttggatgctgtgatgctcaggaacttcagcctttcgaacaggggaatgcttttgtccctggcttcgcaaagaacacgctcattgaatttgatccagctcagctcccggttcacatagtattctggattttcatactcttttagattcatcatcccatccacctctacatctttctttttcggcgaagcaccagccggataccgaatacttcttcaaaaaattcaactttatccttcaaaagccccatctccagagagaagtctctgttggagtcaatgaccagctgcagctcaccgtccttaaacactgcccgcagcttctccaccttctggtaatggctccggtccatggcattagccagacggagaatagccgtgagcttggccaccagcaggtagttcttccggtctaccccggcctcgttgtccattttatcataatagataaattccgaagagttgtaacgaaccgtgttggcaatgatcctgcgctcctctgtggacagcccgatgacctctgtggccataatgatgcggtaagagcactctgccacatcgctcatgctgatatattttccacagtcatggagctgtacggcgatctgaagaagcagccgctctctggcccccatgccgtgaacctttttcatactgtcaaagactgtcagggccagctctgtggtaccccggatatgctctctgtctgtggagtaccgcttactgatgttccgggtggccaccaaaatatcattttcaaatttatgggcgctcttgatgaacttcatccgctctccataatcataggcaatcccgtcaaccaaagccactccaggagcccacatggcctctgcgttaaagatatccagaaagcttctgcagataaccatggtggggatgaccaaggaggcataatccgggtcaatgcccatctcatgagccagcatctgggcaggctctgacacaatggaggcataccggtcctcgaattctgccttggtgatgatcttgtccttcatctcctcatggaaaatggtgtctgtgaggaaatctcccagaaggatcacatgcttaatatcccgctccttcaggtacagccgctggaaattggtcaggtcattcctgataaattcagcaaccagctgatcatagtggatggtctgcttctccaggtctctgagcctctcccggatacgcagacttcccatctttaaattctgtgtggataccagggcatccttgtcaaacaaagacacctggatgctgccgccccccacgtccaaaatggcggttcctttttgtatcatccttttaaaaccattttccatggcggcaatggacttatagcccaagaaatgctgctcagcattgcttaaaacctcaatgcggatacccgtcctgcggaaaatctgttcaatgatgatcaccggattgttcagctcccgaaaggcgctggtggcgcaggctctgtagtctgtcaccgcatactccttcataatatcccaaaagcccagaagaacctcgcacagatcatccaccacaggcgactccagctttcctttggcaaaagccccgttccccacctcaagcttgtagcgtacataattcagctcatgtagtccgatttttttggacatttcaaaaattttcatgctgacctcatacgcgccaatatcaatggctgcaaatgtagtaactgccatatcccctactcctttatttgaaatcctgctccgttaaatgttctttcacacctgctgccccagcagataatcaataaactgctgtgcagtccttccagtgagcccgccatgggacagctcccatttatttgcctccaggagaagctcctcctggggcatggcaatcccgtttctgtgtgccagtgctttgacaatattctggaactcttttttgctgggggccccgaaatagatggtcactccaaagcggtatactaaagaaagcttttcctggaccgtatcagaagaatgaagatcattgtcatccataagctccagcttgtcgctggctttctcccgcaccagatggcgccggttgctggtggcatagatgaggatgttgtccggctttttctccagaccgccctcgatcacagcctttagatatttatattcaatctcaaattcctcaaaggacaggtcatccatataaatgatgaacttataattccggttttttaactgggcgatcacatcattcaaatctacaaactgatgcttatagatttcaatgatccgcagcccctggtcataataccggttgaggattcctttgatactggaggatttccctgtgcccgcatcaccgaacagcaggcagttattggcctttctgccctgaacaaaggcctctgtgttgtctatcagcttcttcttggcgatctcataaccgatcagatcttcaagctgtacatgggcgatccttgtgatgggtgtgatgacagccttgcccccggcatcatgctcaatgcggaaggccttgtgaagtcccagcttgcccaccccaaagtccttgtaaaactccaccatgtcctccagaaattcttccacggtggatgcttttgccagacgctggctcatggtgcagatccggtcccggatccgtttgttaaaaagcttacttccagtatccacattttcataattacacaaaatctggctgtaggaagtacccagcatagtgtcaaaatattccagatcaaaatcataaagctctttaaagatcataaagtccgcttttgccagctcattcatgctgcccttcaccgccccccggatctcacaggccatgctgaaggcattttcatggttcaccagcaaaaaggtgagataattatgccacagatttccggcaaatccatagtttcccgccatctccaccagaccatgaaagcattcacaaaaagtgtccttcttctcatctatattcgttacatccacggcagcgttcatcagccctgtcattttgtccaaaatctcaccgtgctcaaaatcccgataaagtatacattcctgaattcttaccatttttcttctcttttcttatagtttacgattcttgtactttgatgagggctgtccacagtccctgcatcctctaataattgcccagcaccctgcaggtactggcctcctgcttcattccccggatggcatttttgaccgctgcctcctccagattcccctggaagtccacgaaaaaccgatattcccagttacggcccgaaatgggacgggattcaatcttcgtcatgttcagtccattgtaaataatatgagagagcatgctgtataagctgccgctctcatggggcagctcaaaacaaatactgatcttatctgcagttttttcatacactggctttgcactcacaataataaaacgggttgcgttctcgtcattgtgacagatattttcctctaaagcctccagcccgaacagctctccggcctccttgctggcaatagccgcctggcacaaatccttctcctgtgccaccttcttggcagatccggcggtgttggccacctcctgggccttccaaccaggatgggcctctaaatattttttacactgagccagggcctggggatgagaatagacccttttgatatcttccagccgggctcctggcagacccagaagcacatgctgtacccttatgatctgttccccaataatgaacagccggtattcttccagcagatcatagatatcagccacgatcccggcagtagaattctcaataggaagcactgcatagtctgcctttttatccacaatggcctgcatggcatcccgccaggtcttcacatggaagctgtgaatgctctctccaaaatacttacgcatagctgcatagctgtaggcgccctccactccctggaaaaccacctctgcccctgtcagcggcagcttgtccacgaactggtaatccctctctaaatccaccccgtttttagtgagaagctggtactggcgctttcggctgatggccataatctgctgaaacagctcctggacacccaggcggttgaattcactgtccgctttatttcccagcacctccagtttttccttttcccgcttcgggtccagaaccggctttccggtactgatcttatattctgcaacctgctccgagaccttcattctcctctgaaacagttctaaaatttcctgatcgatcctgtcaatttcttctctgcattccagtaaatctgtcatgtttccatcctttatcttcctaaagtatattattgttaattatagtacagacgtatttttttttcaaggcaggttacactaaatctatgcgaaatctatatgataaaattcctgttcatcctgtgaaccggaacgtaaggagatgcctatgaaacatcggtttttactgtgcggaagcatcggctggtgcctggaggttttctggaccggatgtaatgccctgctcaaaggagagcccaccatgaaaggaacctcctccctgctcatgtttcccatttacgggatggcctgcgccattggcccggtatcccggtttctgaaaaatgcccctgtatttctcaggggctgtctgtacaccaccgggatttttttcacagaatatgccaccggcgcttttctgaaaaagcgggacatgtgtccgtgggattacagcgacgcacccttaaattacaaaggtctgatccgcctggactatgcccctgtttggtttgtgaccggattgctctacgaaaaattacttggcaaattatcttgaaaaaagtcgataggtattatatgatgatgggtagagtaattctacaaaatcatcaggaggtattacatgagacatttaatgagtccgatggacttctctgttgaggaactggacaagcttctcgacctggccaatgatattgaaaaaaacccgaaaaagtacgcacatacctgtgatgacaaacggctggccactttgttctatgagccaagtacccgtacccgtttaagctttgaggctgctatgatgaaccttggcggaaaagtcctggggttctcttccgcagattccagctccgctgccaaaggggaaagcgtagctgataccattcgtgtcacatcctgttatgcagatatctgtgccatgcgccatcccaaggagggtgctcccctggtggcttccatggcatcaaccattcccgtgatcaatgccggtgacggaggccatcagcatcccacccagaccctcacagacctgcttaccatccgttccttaaagggccgcttggggaatctgaccatcggtctgtgcggcgacttaaaattcggccgtaccgtccattccctcattgaagctctggtccgttattccaatgtaaaatttatcctcatatcaccagaggaattgaaggtacctggttatatccgcgaagatgtgctggataaaaaccatgtggaatacaaggaggtggaacgtctggaggacgcacttcctgatctggatatcctgtatatgacccgtgtacagaaggaacgcttctttaatgaagaggactatgtgcgcatgaaggatttctatatcctggacaaagcaaaaatggaactggccaaggaagatatgtacattctgcatccccttccccgtgttaatgaaatttctgtggaagtggacagtgatccccgggctgcgtatttcaaacaggcccagtatggtgtctatgtgcgcatggccttgattcttacattattggaggtggatgtatcatgttaaacgttggcgctcttcgtgaaggatttgtattagatcatattaaagctggaaaggccatgaccatttatcatgacctgaagctggataagctggactgtaccgtagccattatcaaaaatgcccgcagcaacaaaatgggcaagaaggatatcatcaaggtggaatgccccatcgacactctggatctggagatcgtgggctttattgaccacaacattaccgtaaatatcatcaaggacggcaaaattgtggaaaaagaggagctgcacctccccaaacagatcgtcaatgtgatcaaatgtaaaaatccacggtgtattacctcgatcgaacaaggtctggatcatgtgtttatcctggctgataaagaaaaggaaatttaccgctgcaaatattgtgaagagaaatacagaggcagccgaaacaaataacaccgccgaaacaaaaaggacaggacttccggaattttattccggttccctgtcctttttttgatcctttgcccccattgtcttcactttgtcccctttacacccggctctccggttcaggcggccgttcttgaaaatatccggcattttttccaatatgctccttcataagcttctccgccctcctgctgtccctcttctggatggcttccagcaacaggccgtggtaatgaatggccggctcacagcccatgcggtcaatgaccgcctccatactctgggccagaacctgctttaggatcatattggtctggatcaaaagacggttcccggtgatctgacagattttaaaatggaactccagatcctttgccgcaaaggtttgaaaatcctcctgatccctgcagcggatcatctcatttaaaattccctccagctcccgaatatcctcctcactggctctctgggcggccagtcctgccgatgcggcatctatgatctcccggaattcaaacacctggaaattggactgattgtccagatacatggtagggatcagtgccttcatactgtcccccacatccacctttttcacaaaggagccttcccccaggcgggtctccagcagaccataggccgccagccgctgcagagcctggcggaccgtgatacggctgaccccgaacatttctgccagttcattttcagaaggaagcttctccccctgcttccactccccctggatgagcagatcctgcagctgctgaaaaaccagctcccccacattcactttttttattggtttaattcccatgtttttcccctttattcttaattttccccgttcttttccccaatcggatgctttgccatatattcctcaaaaatggcggcagccagacccacctgctccacgcagggtcttttttcgtaatactgtgctgtgcggggactgggggctggagcttctcttttcacatttaaatgcagcagctccctgcacacaatggaacctgtgcagctcttaaattcatctgccagctcctggattcttgcatagtgctcctttttttcttctatagccttggggtcttgatacccgtagcaggctcccgctgccaagaacattgcgctgaccgctccacatacctcccgcagtcttcccattcctcccccgaaggaagagctgagtcttaaagcctgctgtggctctaaaccgcattccttagaaaaggccagaaaaacagcctgggcacagttgtatccttctttaaaataggccatggcctgggcggccttttcacttttttcgatgatctccatttcgcatctctcctttgttatcctggatttggtcttctgtgcaaatgagttttctctagatttctgccaaattctgcttttcttcatcatatcacagagattgggttttttaaagaaaaagaaaagaggagctggtcctcttttcttttcatacgccgaaatgctgctgagaatgcattatctgcggattttgttccctgttaatttttcataatatttggcaatggcactgtggtcatcctgtccgcagccatctgccctaagattctgtaaaatctccattacaaaggaggtcaagggcagaggagctcccacgctgtgtcctgtttccagggcattgttcagatccttaatgtgcaggtcgatcttaaagcctggcttaaagtttccttccgtgatcatgggaatctttgcattcataacagtagagcctgccaagccgcctttaatggcatcaaagacctttataggatccacacctgcttttgtgctcagcataaaagcctcggagacagcggctatattcagggctacaatcacctgattggccagcttggtggtatttcccgctccgatctctccacagtggacagcgctgccgcccatgatcatgagaatatcgtatacctggtcaaatacctccttgtctccgcccaccataatggacatggttccatcaatggccttgggctctccgccggatacgggagcgtcgatcatgcgcactcctttttgggcgcaggccctgcagatttcctgggaggaaagaggagcaatggagctcatgtccacaagaatggttcccggctttgcaccttcaagcacaccgttctctcccatcaccaccgttttcacatggggagaattgggcagcatggttataattaatccgcactgactggctacagctttggaagactctcctgcaatggcaccgtcttttactacctggtctatattttcttgaataacatcgtaaacgatcacctcatggcctgccttcagcagatttcttaccataggttttcccataattccaagtccgataaatccaattttcatcatcaattcctcctgaatagactttttatgctctgtgtattgttccaaaccctgctttcatttccttgccagctaaaaacagatcaacctgccatctttttcactgcctggatcagcgcttccttggtaagtccgtgatattccagcacgtcctggtaattgtgggcgctgcagccaaaggtatctttgatcccaacaaactctatgggcttacagtccttgcagaggatctccgccactgcacttccaagacctccccggatgttgtgttcctcggctgtgaccacagctttgcagtccttggccagttctctcactacctgctccttgagaggtttgatagttggcacgtttactaccttcacagacagctccttctcaagctcccaagctgcctccagggccatcccgaccataattcctgtggcaaaaactacgatatccgtgccctccttcagcacatagggcgtgccgatctcaaacttcctgccctcccgggtcacatttggatagtcgtttcgattcagacgcatatagcagggaccttccatctccaccatggccttcacagcctccacagtctcattggcatctgccggacacagaactgtcatattgggaactgcccggaaaagtgccaggtcctccacacactggtgggttgctccatccccaaaatcggacagtccggaagaagaaccacagatcttaacattgagttttccaatggcaatggtctgacgaatctggtcataggctctcccccccgcaaataccgcaaaggagttggtgaaaggtatttttcctgtctgggcaagtcctgcggcaacgctggtcatattcgcctctgcgatccccatctcaaaatgacgctgtggaaatctggcctcgaacagttttcccatggtagagccgcctagatccgcatccagcaccacaatgcggggatccttatcccccagctcaaccagtgtatttccatatgccagtctttgattcgtataagtcatctcaatccctcctgcctatctggacagctcttccagagcttgtcggtatgtatcttccgtgagcattccattgtggaagcccaccacattttctgcaaagcttacgcctttgcccttcactgtgttggccacgatcactgtgggaacaccttttatttcatctgccccatctaaagcggtgagaatctcttccatgttgtgtccgtcaatctctatcacatgccagccaaagcttaagaacttggcaataatgtcaccagagtcaaaacggtccttgattttaccgttggcctgaaggcggtttctgtccacaatggccaccagattgtctgcatgataagcgctggctgccatggctgcttcccagatctgtccctctgcgatctccccgtctcccacaagaacataagtttttctctggctgttgtccagcttttgtcccagagccattcccagtccgatggaaagcccctgtcccagggaacctgttcctgcctcgatacccggggtcttgatcacatccggatggccctgaagataaaaaccgatctccttcgtatgttttaagtcctccaccgggaaatacccacactctgcaagggcagcatattgtaaaatagccacatgtcccttgctgagcagaaagcggtccctgtcctccatccggggattttgagggtcatgcttcattttataaaagtacagggctgccaccaggtcagcggcggaattggacccgcccacatggcctgccactcccacgccgatgctgatgatcacatcttttctcagctgtctggccttcttctgtaaatcttctatcaattccttactgtagctcatcttccatcctcctgtcattcgttggtcataacaaccttgatcaaatttcccggcccctttgccatgctctcaaaatattccggcacttcctcaagggcgatctccctgctgatcaaaggcgccacattcagacttccttcgttgagcagctccaccacccttttaaactcctgatatccatagaggaaggagccgtggacattcagttctcttgtgacgatctcctgcatattgatctctatcattggcttgttatttccgatccatatggctgtgccgccaaaggtcagggctgacattgcctgctggaccgtaggccctgctcccacagcctctatggccacatccaccccaagaccattggtctcttccaggatgcgggctttgaaatcttctctgccgggattgatggtgatatctgcacccatgctttttgccacctccaggcggctgtcacttaaatcggaaacaaaaatcttgcccggattcttcatttttgcacatgccagggccaaaagtccgatggttcctgttccaaccagcagaacagactttccttccagctcccctgcatgggcaactccccggtaggccacggcaagaggctccatgagagaacctacactgtagggaatttcatcctttacaggaaaacagcatttctccggcacacagatatattctgcaaaggcgccgtccacatccaatacaccgaacgcccgcttgttcagacataaatgcacatctcccttttggcacatggcgcattctccgcagaaatccacgggataaaccgccaccttacttcccaccggatagtttgtcacaccttctcctgtctttactacctctccggcaaattcatgtcccatgatcatgggtgctgttcttctgcctgagatccccaaaaatccatggatatcactgccacagataccgcaggcttttacccgaagctttacttcccccgcctttggttcaacctccggcacttcttttaactgcgcctttccaggtccttcatatactatggccttcataatctcccgcctttctgtcttttcaacctgtctatgttcttcttttattatttgtatgttgttagttgtaatacagcttacaagtatattctatcctctttctgtctttcctgcaagacatttgagtacgattttttactttctctgatttacacaattttatctcatgatttttattacttatttttctgccggttcatccccctcattgattcttcgtatggtttctaagggaagctttggcttccggtcataggtgagaagaccgtttatctcctgctccacgtcacagatctgcgtatagacaaacccctgtacaagaggcgattggagcatggctgatataacttcctgatactggcattgaaatgtctttgaatcctgagcgctggtatagccccaccctgcatcctcccctgtttgaaaggatatacctccaaactcggacacgatcacaggctgtccgtcataggaatgtccctgtgcatacaaggtacggttggcaggcatggagggaagcagcgtctctaaagagcggtaacgttctgtgagcgcttccttctttccctcatagtcgtgaatggtgagcagatcggattttgtatggttccagccgtcattggagatcaccaggcgggtgctgtccagagattttgtaagatagtacatagctttggaatgagcctgctgcattttatccgtcataatctctcccactccccaggactcattcaatggcacccaagccacaatacagggatggttgtagtctctctccacaatatccatccattccggcacaaaattcttcacatagtttctggaatacacatagctgttggcacattctccccaaaccagaaagcccagccggtctgcccagtaaaaatacctggggtcctctgctttctggtgcttccgggccccattaaagcccatctccttgcacagagaaatatctgttacaaaagcctggtccgtgggggctgttaaaagggactctctccaatagccctggtccagcaccatcttctgataatagggacggttattcaaaagaaatcttccgttttctacgcttaccttgcgcatagcaaaatagctgtttatctggtccagcctctctccctgactggaatagagccagaaccttacatcaaagagcaccggggtctccggagtccattcatattccttgtgttcccagcgaagatgccggttctggtccagataaaagcccctcacagcccttccctctgtcacagtcaggttgtcgtgaatgagcaggactcctttcagggaaatctccacctcaagcctgcatgcttcctttttgtccaaaatccaatcgatctcaatcatcttccggtcaatatccggagtgaagaaaaacttctttatataattctcctgcactggctccagccacacagtctgccagatgccggtgatcccgggatagaagataaattccggctgttccttccagaactgttttcctctgggaagctccagattttccggttcatcctttgcccgtactgtgatgactgtggcctcctgggtaagggcctgggtgatctcaaaggcaaagggggtgtggcctcctgtgtggcttcctatataaataccgttcacccacacctgtgcctcatagtccacagctccaaaatgaagaagatatctcctgccctcttccagcgtacctggggggattatttttttataccatacaatggagttaagctgatgtgtgcccagtcctgaatatacagtctcacaggcaaagggcacctgaatggtcaagggcagggtaccctgcaaaaaccatttttccttccgtcctttatcttcctggtcataggcaaactgccaggagccgtttaagtttatccattcctctctcaccatctgaggcctgggatattccggccttggaatgttctcttccatggaaagcacctccctgtacatccactattttttcttggtggaaaatctgaacatatgccaggatgccttagggatcacagcttccataaaaccatcccggcacacatccgtatttttttcaaccgggactactctgtccggatgctctgccgtgttggaggctttaaagtcgtaaccctccagggcaacatgctggatacaggcctctgtctccatggttcgcagatcacagcgaagacaaagatcctcctgggtgtttcgattgagcacaaacaaggttcctgttccctcttccggctggtagacacacacggcgtccagcatgggcacatctgtgtattcttttgtatcatatttcgggcagtctatattgacctttaacgcctctcctcttccatacacagaggtgtaatagaagggatagtagatggtctgtctccaggctttgcctcccacctctgtcataatgggcgcgatcacattcacaagctgtgccaggcaggccattttcacccggtcgctgtgacgcagaagagagatcaaaagaccacccaccaaaagtgcatcttcataattatagatatcctccagccttggaggcgcctgcagccaatgctggatctgcttgtcactctctttggtgtggtaccacacattccactcatcaaaggacaggttgatctgcttcttggaccgtttctttgcctttacatagtcgcagatggagaccacagactggataaaatcatccataagcattcccccagccagataagaggaggtatcctcctggaaattcccccaataattgtgcagggacagataatccacatggtcataggtctcttccagaacagtggcctcccactgggcaaaggtgggcatgatcatcttagagcttccacaggccaccagttcaatggaggggtctacccacttcatcattttggcagtctcgcaggccagccttccatattcataggccgtcttgcttcccatctgccagggcccatccatttcattccccaggcaccaggtcttgatcccgtagggagtctcttttccgtgggaacggcgcaggtcactccaatagctgtttttgtcatggttacagtactccaccagattgcgggcggcatcggctcctctggttcccaggttcacggccagcatcatatctgcgcccacctgggtcagccagctattgaactcctgcaggcccacttcatttgtctctgtggtaaaccaggccagatccaggcgggcaggccgctcctccttggggcccacgctgtcctcccagttaaagccggacacgaaatttccccctgggtaacgcacaatggggacccttaattctttcaccaaatctatgacatcccgtcggaagccctctttgtccgcatttggatggccgggttcataaattccgttgtacacagcccttcccagatgttcgatgaaggagccgtagatgcggctgtccactgtggcgatgtgatttaatttatcaacgatcattgctgcattcttcatattgtttcattcctttactctgttatggaccgcttgggggcagtcctgtttattttcaaattacagtcccataaaaagcctttcctatcccttaatccccgtcatggcaattccctggatgatctgcttctggaagatcaaaaaggcgataatagcaggcaccgaggccaccacgctggcagtcatgggcagggtaaattctgacaggttcgctccctgaaactggggaattccaactggaagggtcatcattttctctgaagtgatggataagaagggccacaggaagttgttccaggaattggtgaaggtaaaaattcccacagcggccatggaggaccgggatacgggaagacagatcttccaccatctctggaagggattggccccgtccagcaccgcagcctcgatgagatcatcaggaatgctgtcatagcagcgtttcatgatcaaaactccaatgggagccgcaaggcttggacacataagtccgatgtaagtgttcagcatccctctctctgccatggtctggtaaagaggaatgataatggattcaatgggaaccatcatacctgctgttataagaaggaacacaacgttctgtcccttaaatttcagttttgaaatggcataggcagccatggaggtaagaaacagtgttcccaccgtcaccaccaaagctacaaataagctgtttaaggtccaccggataatgggcgccttctgtgcgatcacggaatagttttccaggctgaaggtccctgtgaaaacctttgagagaatacttaccggcgtcccatagggtttaaaggatgagatgatcatccacacaactggaaagatccacaataaagcggtgataaatacgattatgtatagaatgatcctgccgggagtaatttttgatttcatagtctgaatccccctctactagtctttcttactgaaaatcttgttctgaagtatggtcacaagaaataccaccacgaaaaaggccacggacatggttgccgcctgtcccattttccggttggtgaagccggtctcataaatataatgtactatggtccttgtatgagttccgggaccgcctccagccattaaataggtctgaccgaaaagcttaaaggaagcgatggtctgaagcaggatgaccagggcggtggtatccttcagcatgggtatggtgatggagaacagaatctgtctggggcttgccccatcgatcctggccgcctcgtacaagtcttctggtatgtcctgaagtcctgccagaaaaaggatcatgttaaaaccaacggtccaccataccgtggtgatcaaaattgccagccacaccagccattttgtgttcagccagtacatttccccgatccccagccaattggtgatttgtgtcacaaggcccgtataaggctggaagatgaaaatccaaaggcctgtgaccactgacatggacaacacataaggggagaaaaagcatgcccggataaaggtagttccctttaatttggcattgatgaacatggcgaaaataaaaccgaaaagtacaatggtaggggtggagatcaacacaaagaacagggtattaaacattgcctgccagaagcctttgtcttgaaacatccggatataattttccaggcccgcaaatacctttttgccccctaaggtcgcatcatacaggcttaaattcattcccttcaaaatgggatacatcagaaatcccacaaagaagattaaaaaaggaaccagaaaacaccaggcagtgatggtctctctgcgcttgtttctctttttcacagtgcttacctctgaagccataatagccctcctttctcataaagccagctcataattatcaaaacctgtccagttatgggattctgataactaaaacctgtcttttttgaaactgctgcagcttattatgctgcagcagtggaatttttcattattcgttgtaagaatccagaatctcctgaaactgtgtctgcatattttccatggttttttccacatcctgctctccggcgatcatggaagccagttcacggtaggtcatctctgtcagtccggctacgccgcagatctgtgggaagaattttgcatattctgcagatgctgcataattgcttctgtagggaagtgctttaaaggcatctgattccataacagcggtcttgctgggaatgtgtcccgcctgtgcccactggtctgtgttgtctgtaagccatttcataaaggtcatggctgctgtcttctcttcgtctgtaaggttttcgttctttgggatcaccagagtgtgggagtctgcgtatacagaatcagtatctgtaaactgggggaacggcatggatacaaagttcagtccttgggttccttcaaaagtgggcactgcccagtcaccgttaatggtagccactgccacatttcctgtgaacagctctgcgccgttcttctgattcttcggccagatttcctcatctacaagacgcatcatgacttccagcgcttttttgtttgcctcactgtccaaagtagcggtcttaccttctgcatcacacacatctccgccgtactgggtcaaaagtgtataccacagatacatgggaaggccgttcatggaagttcctgaaagaggcattttgccgctctcctctttgatcttctggaaatattcgaaaatggcgtcctctcctcttggcaccacaacggttccgtcttcttccaccaggcccattttctcaaactcatctgtattaaaatgcatcagcagaagatgggtatccagaggcatacagtaatgggttccgtccacctgggaggcttcctgaagctttccggtaaattctgtccagtccacctccatggaagcggccagatcatcaaggggctcaaggagctcatcggttacatattctttgattctggtaatgtgattgacggccactgtgggagcagaatcagaggtcatagctgccagaagtttggtgtagtattcctctgatttaatgatcatgaactcaacttccacatcctcactctgctcattaaagctgtccaccattgctgtcataatgtccccgtctccgccggagaagggagcccagaaggtgattttctgtttgtccgccgcggatacctccaccaaagacgctgcccccatggaaaatgccatggcccctgccattgtcactgccgtgagtttctttactaaagatttcttcattgattctttcctcctcgttcttttatatagtttgtacagcccttaggacttacttttcatgtactggaagcttccctccagtgtggttctcctacagcaggtttgtcctacgcccttttcaatataaaaatggaaaaagggccatcttgtacgacagcccctgtatgacaactcatgtcttagtactgtcccttacgtgtattaagaatatcatgattcccttcatccgtaaatttgactgttctaagaaatgtgcaaaaacttaaactcatttttcctgctgggagcgaatgtattctcccggactcatacccgtgaatttcttaaataccttagtaaaataccgcacatccgtatatccgctctcctcagcgatctcgtagattttcttttttccctcttttaaaagctgctttgctgcctcaatcctcttctgtgtccggtaggtggtgaatttgatcccaatctccttcataaacagggagcttaggtattctggagtcacattcatcctctgggcaatttcatccaaagacagctcttccctgtactcctgctcaatgatcttcagcaccttatttacgatggggtgattgccgcttcggatatttttcgtatagcgctcatactgcctgaggatattcatgatgatctgacagtaatggtccgtgaacaggctgtccctgacccactccaggatattcagattgctgatgttctcatataaaccgtagttttcccttcggatggcatagagcacggctgccgtcatgcagatgagagcttcccggatatccaggtaagcgtaggttttgctgttcaggtattcgataaacttctccagctccccctccactgcttcaatctctccgtctgagatgtaacgcaggatctgccgttccaattctgagggataggtaaatttatggaccgcgatcccctggatccgctcctcattgatcaccgctggggtgcgcagagtaagattccaatctgtattatcctttaacctgtcccgcatggtgtgcagctcctgaagctcttccatctgatccccggcaaataccacaaagggattgatctttccacggcattttgctaccaggtcatccaaaggctgcagaacctcctcctgggaggcctggatcagtacaaaaatctccttgtgcccgtcatcccagcagggataaaaagggattcccgaaagacacagctccagctcctctattatagcctggtaatcaccctggacaaaacgattctcccctcttataagaaggagatagcttcttttggattcctccatacgcttctccagctccgcaaagaacttgctgttctgaaactctgacatatacaggaccctctcaaaaagctgcccggtggaaaaggcttttgtttgaattttgctggattcctcccggataatggcctcagtctttcgcaaagcctgctccagctgctctctggtcacaggctttaacagatagtccacgctgccaaggagcatggcctccctggcatattgaaattccgcatgcccgcttaaaataatatacttccctgaaaactgctgctccgaaagacagcgcatcatttccaggccagtcattccattcatccggatatctgatatgacaacatccggtctgagggcaagggcctgccggatcccttcctccccgctttttgccctgcctgccacctggaagtctcccccgatttcctcaatgagatgctggatgccattaagggttttcatctcgtcttccactatgagaattttcatactcctcttcccgtcccttctcctgataccgtttgggtattttcgttgttatcactgttccgctgcctacctggctgtccacctggatctcatagttgtccccataatagagatccagcctggcaagaacattcaggactccaatggaatttcctgggtttcttctctcctgaaaaatcccacggatctgctcctgtgtcatcccgtgtccattgtctgagaccacaaaggtaaagtactgctggtccacattgcggatctgtaccttgataaggcctccgtactccatgtccgccactccgtgaagaatggcattttcaataaagggctggaagatcattttatttattttacagcccttcacagactcctgacattccaccacatactcaaagctgtccatgaagcgcaccttctggagatacaaatatttttccagatatcccagctcctcctcaatggtgacaatggtattgcttttctggatctggtacctgaggatctgggcaaactgactgagcatattgctgatctccttttgatcattttcaatggccagccagttaatggaatccagggtgttgtatacaaagtgaggattgatctgagcctccaaagcccggatctctgcctccttctccctctctccagatttcttcaccattttcatctgctcgttcaccgtcttcatcataatattaaagtgtgtggcgatctgactgatctcatttttttcatcctcatggactcccaccttggcagacagcttccctccctgaaccttgttcatggcgtgaagaatgtccttgatatactttgacatcttcttggacacataagccacgacaaataccaccaaaactgccaacaacagtgaaataataaggacaattctctgtatgtcatccaatttatcataaatatagctctcattcaatacactgtagagattccactgggcacttggaattgtttccttcaggatcagatagtgcccgttctgggtgtccagctccccggcatttttgtctccgaagatctcctgaacactttttccaatcatatccttgtcctgatgggacacaatcctgccctcctggtccgcaatgagcaggtagttgatatttctgtcctgggaaatctgggcattttcacagatttcacttaaaacctcctcctgaatgctcacgatccctgtacccacctgccggttcacataccagtccgtcacctgttttccataggaatacacataatacttcttcgtgcccctccggtccagaaattctgtccctgtccattttcccttcagcccctgattgtcctcaaagatctcactgtcataataggactggtgaagcttggagatgatgggattaagaagctcattttccatgcggtcataaccatagctcacaccgctggtggtcttcacggacatacagcgcacttctgagcggtaggtcataaattccttcatgatgccgtccagcttttccttaatttcccgctcctcctctccgccctgggcctttcccagcgccgccacctccatgacaaagtccgtatcccggaaaagttcattaatggcctccttgtagccttttaaagaggtgttgatatttagtgccgtctgctgaagagaatgctgaaaggaatccttgatcttctcctccagaatctctcccatataatagctgctcaacccctgaacaatgaaaagctgaaagagaaagaccgtgataaataccagggtaagctggttggcaaaggtgagctttttccaaaagcctgtaattctcttcataggctttaccactcggcaatggaaccgtcttggtggcgccatatgggatttttccagttatggggagtctgattttcttccagaaccagctcccggttcacctccacacccaggccgggcttcaccggaagcttcacaaacccctgttcaaaggcaaaatcttccttgttgtttacataatccagaacacttttacccacattatagtgaattcccatgctctgctcctgaatcactgcattgtagctcaccccgtccacgttaagacaggcgcttaaggctatgggccctaaggggcagtggggagccagggccacatcataggcctctgccatggccgcgatcttacgtacctccgtgatgccgcctgcatgggaaagatccggctggatgatatccactcccccggcctggaaaaggcgtttaaaatcccatctggaatagagacgctcccctgtggcaatgggaatgttgcaggctgccgcaatctctgaaaagcactccatctgttcacacaataccggttcctccaaaaacatggggtcaaactcttccagcttcttggccaggatctttgccatgggcttgtgtacccttccgtggaagtctatggcaatgccgaaatattttccgcagctctccctgatggcagccacacgctccagtacctggtcgatcttctcatagctgtcgatcatctgcagctcctcggtggcattcattttaatggcagtaaaacctgcatccttccgctccttggctgcccctcccacatcgctggggcggtccccgccgatccaggagtatactctcatcttctcccttagcgctccccccagaagttcatagaccggtacgccgaaatgttttcccttaatatcccacaaggcctggtcaatgccggatatggcgctcatgagcacaccgccgccccggtaaaagcctgcccggtacaaggtggtccaaatgtcctcgatccgtcccgggtccgcacctatgagatagtccttcatctcctgaacgcaggacagcaccgctgccgcatgtccctccaggacagcttccccgaagccggtgatcccctcgtcggtgacaatttccacaaatccccatctgggacggacaaaataggtgtttacttctttgatcttcatatggttttctcctttttatttttatctgtatgtcaacatacatcttacaacttacaatatcttaatttttataaaaaaacaagaggattcttttgaggcctggagaactgctttatatttacagaacctgtcacgggcagcttttcttggcacattgtgtaacaaaaagccgcgctacttatatatagcgcggctttgatgaattcttttgaattttggaagtcggaattactatggagcttaacgcactcccattactctataaacattttctttctttattttcaccttttcattcttaacagcagttatatttagattcttttttaccgagtacttctgtcccgccggccaggctttcagagttacatagttacctccgggaactgaatagtgggcgcacctggtagcctccccggactccttgccaagataggcaattaccttttctgtttctttttgaccgtatgctgagtaagtgtattgaatgtatagatttccgtccgttccgtatgtcatttttgtaacagtggcttcttccaggcctgtccaggaaatcttccaatcaatggccagccatgccaaagcagccattttttccggagtgaaggatccggtttggggaatggtgactttttttaccgggctgaatccgctgcgggatgtctttccccctaatttgcggacactgcgtactttataataataggtggttccggtttttatattttcatctttgtacacaatataatcctgggctgccaatttcttcatattggacgtggtggttcctctatatatttcatactccgtagctcctgatgcgcacagccatgacagctccactccagcgccagacagcttggcggccgttataaccggtgcctggagctttgtctgggctgtgactcccttggtattataaccactataggtatatgttttatcatttactgagtaagccttcaccgtataaatacggcctgctcctgaggaaccggttttcagctcacagggcagcaaatacatgtctgatgcggggtaatccttgatttttttccactttccatttaccttctcataaatatagtagccatctgcaccagctacagagctccagctaagaagcaccttttggtccaccgcataagcacttcccaatacgggagccgccagctttatgacagcataaattcccgtcttgttatagccgctccatactttttttccgttgactgttctgtaggcacggactgtgtacgtgtacttttttccaggaataaggccagtatctttatactgtacagtttttccgctggtgatcagcttcaccttattccaggtgttgctccacacatcttttctgtacacctgatacccgtttgcccccggcacccctttccaggtaagagtaactgtgttggtattcaccggtttcacggaaaccaatgcaggggtggctactgtctccgccgcctggacctgtacggcccctccataaaatctctgaccattttggggcacaatgcccagcagtaccattacagcaattaccactgccaaaaattttctcttgcttttcatcgcttctctccttctctttttttctattcttcaatttttagccgcaattttatgtatataccacctcctgtctgagttcttttatccgcttattcctatagtaattttatattaccactaagtggctttggataccacaatttttccaaagttaaggaattttacttacaaaacaaggaccagcgcaaaattcacgctggtccttcatcatctcatttattctatttttatacgcaagcaggccgataagccgggttatgtcgttgagtgatcatctatctaggcctgccgttaccgacaggctcaagcgacccacctgaaagcacgacgggcagccgtatcgctttcttttcggtcttgcttcgaatggagtttacatgtgccgcacctgttaccaggtacgcggtagtctcttacactgcctttccacccttacccttcctaagaaaggcggtttatttctgttgcactggtctgggtgttgccaccaccggacgttatccggcatcctgccctatgaagcccggactttcctcacctggcacctttcggcctgccagctgcgatcacttgtcctgcttgcgcatttggtattttaacacgattttcctaatctgtaaagccctagaaaacctcaaatactaggctcttcgggcctctttgcgcctttccagtgcatccacgcacatggtgcaggcagcgtcgccggtgatatttacacaggtacgtcccatatccaggatacggtcaattcctgccacaagggcaatcccttccacgggaagtcccacgctttcaagaaccatagccagcatgatcatacctgctcccggcacgcccgcggttccaatggaggccagaactgtggtgagaacaatggtcacctgctgccccaaggttagattaatcccaaaaatctgagcgataaaaatcgcacatacaccctgatagatcgctgttccgtccatgttgatggttgcccccagaggaagcacaaagctggctacttccttcttggctcccagcttctgggtgcattccaggttaaaaggaagagctcctacagagctggcactggaaaatgcaaagatcatggcaggactcattcccttgaagaatttcaatgggttcatgccattgatgatcttcacagtggaggaatataccaccaccatatgtacaatatacaccaaataagccacggcgatcactttcaaaagaggaagcagaacggacgggccatttgttgcaaccacgggcgtgatcagtgcaaatacaccgatgggggaaagcttaatgatcattcccatcaccttaaagctcacttcacagaagctgtctaccacatccttggcaacctttcccttctctccggccagaataataccgaagccaaagaacaaggcaatgacgatcacctgaagcatggtggcgctggccaggggattgataaagttggacgggaagatgttcacaatggtgtccataaagcttggcgcttctgccgcttcataggccaaatccgctgtggagatctgcattccgcctcctacttggaataggttggcaaacagcagaccaaaggtaaccgcaaaggccgttgtaatcaaatagtagacaatggtttttgccccgatggaacccaccttgcgcacatcctgtaaagaaatgattccctgcataatggagaggagtactacaggcactaccaccattttgatcaggttcaggaagatggtaccgaaaggtttaatgtacgattcggcaaaggatgcgtttttctgcaataaaagtcctgcggccacacccagaaccagtgctgcaaaaatccacacagttaatgatacttttttctttttggcagttgaattttcactcatttatttccctccttcattgtatggtttatatgtgaaaccacataccaaacacttttatactgtttcaatgtgtgtatcacacattgaaacagcttcccccgataaattccctcaaaatcgaattgtgtggcacagcctcgctgggcacaggcacaaaatattcaaaaaatttcagcagcctcttggcctccgcatattccggcgtatccttttctatgccgaacagcagcggctccgcatacaccttcagacaggccagctcatagatcagtgcagagttgaacataatgtccgcctcttcctgatagggaaagatatactgctcctctcctcttcgcacactctgccaccgggcaatggtctccttggcacaggttccccgggttctggcatcccggacgattctgcggatcagccggccatctgtggtggggattctgttgtgctcatcaatgttcagctgggtaagggcactgatataaattttaaatttgctttccttgggaagggcgtagcttagcttgtcgttgagcccatggatgccctcgatcaccaaaacatcctcctgccccagctttaagaagtctcccctgtactccctctgtccagtcttaaaattatacaccggcatttccacccgttccccggcaagaagggccagcatgtctttattaaactgctccacgtccagggcttccaggcactcataattcttttccccaaattcatccagaggcgtgttcacccggtctacaaaataattgtccaccgcgatgggatggggcttcagcccatgagcagaaagctggatggagagcctgtgggaaaatgtagttttcccggaagaggacggaccggcgataagaatcaccttcttttttcccgcagccaggatctgctcagcaatattggacagcttcgcctcctgtaacgcctcctggataagaagcacattctggatcccctctttggtgatcctgtcattgagctctcccactgtggatatctgaagcatatccccccagttttccgattccttctgtacctgaaaaatcttatgactgggacgaaacggcggaatcatctccggctcctgacgggaaggaagctgcaggataaagccgtcatcatagggaaacagatcaaaatatttaataaatcccgtgtgataaaccatatatccatagaaatagtcttcaaaatttcccagactgtagatatttactttggaacctctccggtattgaaaaagcctctccttgtcatacatatgatgcttgtggaacagctccacagcctcatccgtatccaggctgcgttttaaaatcggcattttctcatccacgatctgctgcatcctggtcttcacccggtccaggaagtcctgattcacagagcttttcccttttatggtaaaataatagccagagcccacggaaaaatacagaaccacattttcaatatcttcttttccagccacatcgtaaatcgccttaaataagatcagacaggcacttcttttgtatgccttgtgtccaatggagttccgggctgtgataaattccaaagtacagtccttgttcagatgcttatgaagctcccgaagcttcccattcaccgtcaccagcaggatgggagattcctcttcctgctggaaatcctccacgatatctgcataacagcatccgtcggggtactcccacacctggccccggacagtcacttttctcattttatctttcatgttaagtcctcctgtattcactgcagttgttcctattttatgcaatccagacacgctgtgtttcattgcggacttctttttctcagattccctgaagcgggcttcagaaaacagcataggggacaattgtcttcgcccctcttaattccaggtctggaaaagcttctgtgaatacttttaccatttcttccgtaaaaatgtattccgttccataatgtcctgcatcgatcaaggccaggccctgggccactgtatcaatcccggtatgatgatcaatatctcctgtcacatacacatccgcccctgctgcaatggcctctgaaatcatgctctttcctgatccggtacagatggcagctctctttataattcgtgacagatctccgtacacctttacatccgtgagcctgtattggcttttcacatacctggcatattcctccagagtcatgggtctcaccagatctcccactcttccaaagccctcctgcaccccatccgcctcctgtgtcacagaaagtacctgggtatctgaaagcttaagataagcggcgctcaaatctgccattcccttcacatcgtagttggtatgcatggcatagtaggaaatatcctcctgaatcagcttcaggatccgtcttcccgtaaaggtttggttgttgatcttttttattccggaaaaaatcatggggtggtgggtgatcaccagatcagcgccaaattccactgcctgggccagtgtgtcctctgtaaggtccagggcaaagaacaccttgctcacctctttgtcatctcttcccaccaaaagtcctacattatcccagctctctgcataagaaacgggatatttttcttctataaatgcaagaatctcgctacatttcatatatcttcaaggcagcctttatgagtgcctcttcctccttcatctcctccatgcgcgccagggcggcggcactggaatccagattttgggaaagccgtgccagaatatctgtgcacagccgttcctcccgctccagaaattttctcagcacaggatttttttcctggagaagaagctttccgaatcggtagtccatttccctgtaagggggcatttccccccgtacagccttcatcatgggataaaattttccctcctccaggatcattctctcctctgtgatggtaaatccattttggcccaaataatgccggaaatgacctatatctgactgaggctgaagaatcagctcctgaaagctgtctctcacctgggccccttgggtgaggatccgctccatcagggggccgcccattccggcaatgaccagggtctgtgcctcttcaggctttaacgccgacaggccgtcggaaatcctggtttctatgtaatcctccaagccataataagaaatatgttccattgctctggcaagaggccccttcttcacatccatggcaatggcgcttggaatttttttatttagtactaaggccaccggcaggtatccatggtcgcatcccacatctgccacacagttccccggtgtcaccatgtctgctatagcagaaagccgtttggaaagctgcatacttccccccgttaatccagatagtccttcagcttgcggctgcggctgggatgacgcagcttccgcagggccttagcctcgatctgacgaatacgctcacgggtaacattgaactcttttcccacttcctccagcgtgcgggcacggccgtcatccagcccgaaccgcagacgcagaaccttctgctctctgtctgtgagggtgctcaatacctccacaagctgctccttcaaaagggtaaaggcagcagcatctgccggaacaggcacattgtcatcctggataaaatctcccagatggctgtcctcttcctcgccaatgggtgtctccagtgataccggctcctgggagattttcaggatctcacggactctgtccacagacatatccattgcctcagaaatttcctctggggttggttcccggcctttctcctggagcagctgacgggatacccggatcagcttattgatggtctccaccatatgcacaggaatacggatggtccttgcctggtctgcgatggctcttgtgatggcctgacggatccaccaggtggcatacgtactgaatttatatcccttgctgtaatcgaatttttccacagccttaataagacctaagtttccttcctggatcagatccagaaacagcattccgcggcccacatatcgtttggcaatactcactacaagacggaggttggcctcagccagacgcttcttggcgctttcatctccctcttccatacgctttgccagctcaatctcttcctctgcggtgagaagattcaccttgccgatctctttgagatacatccggactggatcttcaatgctgacaccctcgggaacagacagatcaattttgtccagctccacatcttcctcttcgccaagcttgtccagatcaatatcatcgtccaggatcagctcctcgcccagatctccatcggttatccgaagaacatccacaccgctggcctccagaaagtcaaaaaccttttccatctgctccacactcaaaggcgtgtccttaaaaaagtcattgatctcctggtattccaacacgtttttccgcttcttggccaattccagaagctccaccagtttctcactgaatttacccatattcatttccataggtgttccatccttccatatgttgtttatattttatcctcaatcaaaagaaatattcagttcattcctgcgttgtttcagggtttccagctcctttttctttacaaccaaagcctggagctggctcagatccgccgcatttctggtctgcatggccagactctcctccttcaatctgagaagggcatcggaaaatgcccggttctgctcctctttcgtctccagatggatggttgcattaaaaagcgaagcgacctctctttgttcctcactgtccccgaaatagttcaaaagtctggcgggattcacatccccctcttcctgctgcttatacaacatctgtgccacctgacggtacaagggattggtaaaatcctccggcaccagatatttttttacggtttcaaagattccaggataggttaccagccaggtgagcatcagcttctgagccttctgcccccctgtctcttttaccttcttagcaggatctccggttttgggccggattctttcctgggctggagttcccttcagagccaggctgttcaccctgcgcttcagatcattggcagtgataccaaatctctgtccgtaatcccggacaatggcctccacatacagattcctctccagctcatcggcaagctccagcagcatctgggcgcaccgctcaaaaaaagcattctgtccctgaggctcctccatggaaaactctccctgggctacgctcacccggaacataaagctgtccatagcccgccccagccgctcttcaaaagcttctgcccccaaagttttgataaactcatccgggtccttatagggctttagatccaccaccctggattccactcccgcttcctttagaatgggaattccccgcagggccgcgcggatccccgcctcatcgctgtcatacaaaagaagcacttcctgggtataccgcttcaaaagactggcatgtccggaagttagggctgttcccagtgacgccaccgcattggtgaaacccgcctggtgcatggatattacatccatataaccctcgcacacgatcaggtactttttcctggtggtccgggctacattcagtccgtacaagttcctgctcttatcaaaaatcttcgtctccggagagttcaggtacttgggcttaccctctcccatcacacggcctccgaagccgatgacccggttatttacatccataatgggaaaaataacccggttccaaaatttgtctgtcatacctctgcgctcatccacgttaaacaagccggaatcccgcaaaagctcgtcactgtattttttctgctttagatatttgtacaaatcgtcactgtatttatcagaatatcccagtccgaattttttcatcgtctcatcggacagacctctgtttttcagatagccataggcctgtgagccgctttcccggcggagctgataataaaaatactgggccgccagcttattgatctccatcagcagggcctttctgtccgcagccgccttggcctctctggaatattccatctggggaagctccacaccggccctgtcagccaggtatttcagcgcctctccaaaggtaaaattctcgtattccataatgaaagtgaagacatttccccctgctccgcacccaaagcaataatacatctgtttgccgggagatacggaaaaggacggggacttctcattgtgaaagggacagagcccaaaataagagctgccctgccgtttcagcttcacatattgggaaacgatgtctacaatgtcgtttttcgttcgcacttcttcaataatgtcatccgaataacgcatgctttcctccgtttcatcactttccctttcgggattttaataaacctcccaggctttggggatgaaaatatcacggaatttatccatggaatactggtccgtcattccggacaggtaatcacagaccaccgtctcttttttctcaccctgcataattataagctcccggtattcctgggacattttgtccgggtgcttcatgtaatattcgtagagctgggtgagcatctgaattgccttgtgctcctcccgcttcgcctttggattctcatatacgttccggaacatgatccggcgcagctccatcatggcctcctgaatatccggggacatgctgatggaatctttatccatgctgttctcaataatatcatggataaatgtgttcagcctctcccttgtggtaaatcccagcatcatccgcatggtgatggggatatcatcttctgtaatgattcctgccctctgggcatcgtccatatcatgatgaatataagatatcttgtcgcaaagacgcacaatctgcccctccagcgtgttgggagagccgctggtacgatgattgcggatcccgtccctcacctcccaggtgagattcagacctcttccgcctttttctaacacttccactacccggatactctgcttatagtgggcaaagccctccggattgatctgatccagtgctctctcacctgcatggccgaagggggtatgcccaagatcgtggcccagggcaatagcctccaccaaatcctcattcaggcgcagagcctttgcaaccgtccttgcagtctgagaaacctctaatgtgtgagttaaacggttgcggtagtgatctccctgaggagccaggaagacctgtgttttgtctttcagccgccggaaagccttgctgtgcagaatcctgtcccggtctctctgatacacggtacggatgtcgcattcctcctctgcacggtcacggcctctggaattccggctgtgggacgcatagggacttaactgctccagttccctctcttccagacattctcttatattcataggctgttcctccgcagactgacaaaaacctcttatttatatattctacaaaaagtgtaaaattcctctttttttaggaaaaataaatttggcattttttttggagcaggcaatgggatatggattttctgtggttttttggggaagatgagagatttttaaaacacaggtcttgaaaggtgtgtacactgccttttctttaatccgtagatcttttatccgcatataggaattatggaaaaatacgctacccttcattgaacgattatgatataattataaatcactgatagattatgactttttatacaaagctggatcggttcttaattcacggatgaatggcaggattcctgcttctgaatcgagagagatgactttaggttggatctttcttacttcttgtcaggaccaactcatggaagaaatggagctaaaggatgacagccatgcaaaagaacaggaggtttgtggtgaaaaaaaggaaattcgtaagtttgtgtatggttttttatcttgtgggaaccatgggatgtaacagtcgtacatctgatcaaaaagaagctgccacacagcaatctgaacaatcgcagagtgaagacacaaaagaaatccccaaagaagaggaaggagctgcggatcctgccgggacaggttttacaccgcccaagggctcccataaagacagaaacggaaacatcgttgatccagagggcaacactttcgatgaggaaggcggatggacggtgccagagggcggacgtgtagattcaagcgggcgaatttacgataagaacggaaaagtgatgggcggcggtgccacaattggttccaaaggataactgaactttttatggtgcagtctggaaattgtgtgcagctccccggagtattttctataggaaagttcagagaactttcctatataaaaaaagagcggaaaccctgataaaatcaatggtttccgcatctcttaagctaatgcggaagatgggacttgaacccacacgagcgcattgctcacaagatccttagtcttgctcgtctgccagttccgacacttccgcatgtcgttgataaaagtttttttatcacttgcgacaggatgtagtatatcaaacccaggggcagttgtcaataagtttcttaaaaaaaaattgaaaaattttcatgtatattttaaactatatatattaaacattattttgatgtattttctatggtgtcttagctgttctataggaaatgaacacaacatttctataaaaagaaggaggccggaactgtccatagttccggcaaatgaaaaagaaaaagtatctatatttaaaaagcatatcgctttgttgagtactaatataactggaatctgtgatggatctgtgaccaaaaaatgaaagaatcataaaaaatatttttatttataatttataaattctggttctttgctctatacttatctaaaaacccaaaatcacatgccttcagaaaaaatacaggtttttgcatccaagtgggatcacatagagttttcctccatataaagagatttataccagggaagtcaccatttctattaatgaactcccttccttactgcctgtattggttgccgccaaagggaaaaagatatataatcacacaaaaggaacctcacggtcactctaacgtaatattataaattcctattgtccttgaaaaagggatcgcgtcatgcactctgttattatagaacctaattctgaaatgtccctgttttgtaacatttagggccatttatgggatcattttcttcatgactgggatatttctgtaacctttatgttttataatgtcctcatcaacaggtaaataacctgggaaggagcatgtatttatgaatatattgcagacaatcgacttgaaaaagcattatggcacagagcctaatattacccgtgcacttgatggtgttaatttatctgtggaggaaggagacttcgtggctgtggtgggaacctccggcagcggcaaatccacccttcttcacatgatgggaggacttgatacccctacctcgggaagcgtatccgttcgtggagaagagctggccaaaaagaatgatgagcagctgacgatttttcgccgccgcaatattggatttatctttcagaactataatctggtgcctattctgaatgtctatgaaaatattgtcctgcctgttgaactggatggagatacggtggatcagaaattcatggctgaggtggtgcggatgcttgcacttgaggataaactgaaaagtatgcccaacaatctctccggcggccagcagcagcgtgtggccatcgcccgcgctctgatcaccaagcctgccattgttctggccgatgaacctacgggcaatctggacagtaagacaagtgctgacgtgttgggccttctgaagcggaccagcagtgaatttaaccagaccattgttatgatcactcataatacagagattgcccagcttgcagacagaatcgtgcggattgaggacggcaggattgttaattgagggatgaccaataccatctgtacgaaaaaacctgcttgggtacccatttactttgtttattggagctggtgaatcaaaatccgaacactccggatccggatttgcataattaaatggagctgaatacacaaaatccgaaccccttgccgagttcggatttgcatttctaagtggagcatacgggacttgaacccgtggcctccacattgcggatgtggcgcgctcccagctgcgctaatgccccttgaactaagtataacacatggacaatggaaatcaatatgtaattcttacttaattcacattctttgaatatatatcatttgtgtaacaaatccctatttcgttggcaaattttatttacttaagatagtttctgtgttatagtttatatatcacaggggttaaaagatgtgcttaaatggatttaatagaaatagggagataaagctaggtacactgtcccgtttatttcagattattatgcattttttataatagacaattaaaatttcacttagtacagcagtagacaggagacttcttctgcttaaagtcacttggagagtaaataatgtatgctattgacaacattaaaaaaagctatatttatgaaggcttaatttgtatattggcaatgatatctgttatgtttgcaattattgatatagcaaaggggcttcctgaatgggcattgatcctagacagaatcatttattttatttttgttcttgattatattctgggatttctattaagtaatgataagaaacattttctttccaggcatattgctgatttagttgcaattattccttttaattcagcctttcgggcatttagaatggtaaaagcctttcgcatattcaaacttacaaaatttgcgaagctcttaaaaatgatcaaattggtctctgtatctggacgtctattcaaaaaaatcgagaaatttcttaatacaaatggttttaagtacatgattttatctactgcagtcttaattttggccggtggttccttaattacttattttgaaaatatgagtttttcagatggtatctggtgggctttcgtgacaacaactacagttggatacggtgacatctctcccagcagcaatatgggaagaatcatagcctgtatactgatgctcatgggaattggtcttatcggttctcttacctccaccattacaacttatttcataggttcaagggatagggaagtaccaataaataatgaaaagataaaaatggtaaagattttgtatgatgaattgacagatgaggaaaaaaatgagtttaagaatataatcagctaagtttaggaaactcgctcaagaaaggaataggaatgtaaataaagtatgagaccaaattttgggcaagttcgaatatgaggaagataggataccctaaatctgttttctgaaaccacaaaaagaaaagccggccggatgtatcccctatttaactgcattcaacgtttcagcatgcattaaatattgttaacatctggccggccatatgtttgactgctcctgaccatccctatgaaatgtagcattaattcagttctgcgattctgctcactcccacataaatttcctgtattctataccaagtccgataatcaacaatgcctgtttccgggaggccaaaaatactctgaaatttttctactgcatttctggtagcattcccgaaaattccatccacggaaattgtaggcattgccggataagcccctgcgatcacgtttaactgctcctgcatctgccgaaccttatcccctgtggaacccacctccagattatgtcccggccaagaggcaggaattcctgagattgcttctgctgtgttgatgtacatgctgtttccataataataccggagaatttctatggctgagtatccctggtctcctaaatacttgcttccccattgtgtcatccaatttggacactgcacctgtcttccgtcgcagtattgagtaagaattggctgttttacattgggccgtgaaagatagttttcccacaattcatctaccaccacggaaatgctttcaaagatatttcgtcctggtatccacttatgatcataggccgtagaggaagtgattgtaaaatcatatcccttatttctgtaccattccgtataaaccctgtttaatgtaaaggacataatagcaagtacatttgcccggattgtatcctccggccaggtggcataaatttcgctgctggccacatttttaatgtaatccttgtagcgcacatagtaatcctgagcggttgtgtcccgaatggcaccgtcatgtaccacaatatattctggaatcaccactctgcttaaaacaatctctccggattcatttacaggtttaatttcttcttccggtattttcggaggatattccccgaaaagggtatgagccggtataacgatccgatcaaaactgtctcctggcgtttgtgggcgcatggatacagactgctgtgcggtcacatccggaagaacttctgttcccgctatctcctgcagctcaaactgtggcgcagtgacctgtatggtatattccgcgtagggctgttctggcgatggttccatactgtattccaggggaggtgctggcagagtaagttctggtattaaaccggaggaatcggtgcgggcctcctcaattatcccttccggatcccctgtataagaaatccgtaccaccgccccctcaatgggtgtgttctccactgcagaagtcaccttaacacgaagtctgccacggtctatcatttcctccatagctcttattttcccatactgcatattcaaacctcatattttcccgttcctattattctatgcagacccaaacacaatgttacacttctgtaaaaataactaggcgggcaagcctgcatcaacttcccatcccctcactcatgttgggcttgacggctttgcccgcctattttcttctgccagatattcttccaaatttaagactccgcacatacataaattacttcttagaggactgtctttgtattatatatgaagctctttcattttcagttgtctcacttttacaaccattcatttccaaaagaatgtgtaaaatcagtaaaaagtgcagaaaatgatacaagtaattttgactggagtgaagggaacatgcctaaacagcgtagagataccggtgaaaagaattttacagcccatcaattaataaggctaagagaatataagaatctttctcagcgccagttagctggtaaattgcagcttaaaggatatgatattgataaaaacgtgataacccgcatagaaactaataaacgatatgtgacagatctagaattaaaagccctgtcagagctttttgagatttcctactcctatttgatcgatggggtaaaaaccaaagaagatgaaaaattacatccagatttataatgtaaatttaagatttatacttctatcatggacagtatatgttgatacagcagtgtttattccagttcattagcagaggttaaagattgatgaagccattaaaagttaaagtcagtataacattagatagtgatattataaaacgtataaaaagcttggcagaggatgacgaccgttcattcagtcagtatatcaatcaagttcttaaaagtcacttgggtgatgaaaaagagaaaaaggattgattttaaagctctggtctttctaaacacaatcggctggctttttcctccgttaaatatactaatgcgtttacccaataaacgaggtataatataaacaaatcatacaaaggaggctttttctatgaaaaagaaacaaaaagcttggctaagacacctcttggctgtaatactgggtatcctcttatttttttcagtttttcccaatggggttgtgacctctgcccagggggatcctggaacactcactctgcattttcttgatgttggacagggattatgtgttttaatggaatccgatggacattatgcgatctatgatggcggcggtccggagcgttcctcttatgttgtttcctatctccaggaacaaggggttcaatccttggattatatcatcgcctctcattatgacttagaccatataagcggtctggtggggataataaatgtgttccctgctgccgttgtcctggggccggattatgtgggcgacacagatatttatacttcctttatgaataagattgaagaaaaatccgagacgctctccatcccatctgttggggatgtgtatacattaggctccgccaccctgcatatccttgcccctttagaaagatatacagatccaaatgagtgttccatcgtcataaaggctgcatgccaaaacacctctgttttgctcacaggtgatgcctccaatcaaagtgaaaatgcaatgatcgctgctaatacagatgtttctgctgacattttagtcattggccaccacggaagcaacgccgccacatcggatgactttctggatcatgtgaatccccagtatgcggtattaagctgcggatcggataacaaattccgtcatccagcccaggataccatgaccagacttcaaagcagaagcctccccttgtacagaacagacttacaagggaccatcactgcggtccttgacggctccactattacctgggatcaagatcccagcatggattacactggaagggatacagatcagtccactgccccagaagcagcctccgctcagccagcaacatctgctgcctctgaaaacctcgctgctccagatactgctgggacagcctatgtattaaacaccaactctttaaaatttcattacccttcctgtcatagtgttgaaaaaatgtcaccagaaaacagaagcgattataacggcacccgtgaagaagttatagcaatgggatacgacccctgtggaaattgtaatccataataaacgatggatccccaggttttattctgagaaaggatcctgccttacaggtttctccgtcagctccaaagaactttcctaattttagataactttcctatgtaagaaccaaaggggtccttctgctctgataagattcataaagcagaagaaccctttttcattgtacaaccatggtttcccgtttagttgagaagattaaataattttcataatatcctggtacatgaccaccaccatgagcagcattaggagcatcagtcccgcaaagtggatcattccttccatctcccggttaatgggctttctgcggatggcttccacaacaaggaagaccagtctgcctccatccagggcggggatgggaaggaggttcatgacgcccaggttggcagacagaaggatcgccatgttcagcatattcatccataccataagagccccttcactcttagcctgttcataggtgtctccgatcacatccacaactcccaccgggccgctcaggtccttgatgccaaatcttccggtgaccagttccttcaggctcaggactgtggtgcggatgagatatttcacttctaacgccgcatacttaaagattttaaagccctccgtctttacacacccaatgttgtaggcaaagcccagcacaggcgcccggtattccttgggggtgatgacggtttcatattccaggccgtccctttcataggcaaccgttacttcctcctgggtaagaggatggtcggtaatatatttttgatagtcatcaatggtgtcaaaatgagttccattgatgcctgtaatcgtatccccttccttgatcccgctgttcttggccggcatctcctcctccagggagcccacctttagggatccagaggcgaagtttattcccatcaaaaatctcacataatcatcgggtacataagagatttctttcttttccccatctctttcaaaggtgagggtcacggtttccccggactttaccggttccagatagctgtaagcattcaaatcctttcccaggtcaatggtatacccctggaatttccggatcatatcaccctcctgaagtcctgcctgggcaaccggggagccctcctgaacctccagcacctccggcggctcataccccacaacagccacaatgatcacagcaaggacaaatgccataatgaaattaaaaatgggaccagcggctatgatggagatccttccccacacagaggcattgttaaaggtgcccggagtatctgatccgctatcctctccaagcatcatacaggagcctcccaaaggaagcagcttaatggagtacctggtgcctccctttacagtgctcacaagtctggggcccattccaagggaaaattctgttactgtgacgccgttttttttcgccagaaggaaatgtcccagctcatgaaataaaattacagcgctaaaaatcaaaattgcaataataatcttcaaactaccacctgccttcaatccaacgataagtctcttcttcggtagataaaatttcatccagatccggattctctatgattttatgtctgtccatagactgccctatgatctcataaatatccaggaaacgaatctctctatgtaaaaatttttttaccgccagctcattggccgcattaaataccgtgggcatagttccgccctttctggaagcctccatggccatgggcagtcccaggaaggtatccatgtccggttcttcaaaggtaatcctcttcagtgccgcaaaatccagccgttcaccatccagatactttctatggggatagtaaagggcatactgaatgggaaggcgcatatccggcgttcccagctgagccataatacctccgtccacaaattccaccatggagtggatcacactctggggctggaccaccacttgaatctgatccagatccatgtgaaaaagccacttggcttccataacctccagccctttatttaccagggttgccgaatccaccgtgatcttctgtcccatcacccagttgggatgcttcagggtgtcttccacagtcacctgttccagatcctgccgtttctttccccggaaaggtcccccggaggcagttatgagaagcttactgacttccctgggattttctccatggagagcctggaaaatggcgctgtgctcactgtccaccggtagtatctgaaccccgtatttctctgccattggcagaatcaaatgaccggctgtcaccagagtctccttgttggccagggcaatgtcctttcccgcctggatcgccgtcatggtaggacggatcccgatcatacctacaatggcggtaaccaggatctgtgcctcctccatggccgccagctccagcagtccatccatgccccacaccacctttgtatctgtgtcagcaatggatacggccagctctctggcagcatcttctctccaaaccgcagccaggcggggagcaaattctctcacctgtgcctccagcttatgaatgctgctgcctgcactgatccccaccacctgcaggtctttgttggcccgcaccacatccagtgtctgacttccaatggatcctgtggagcctaaaattgcaatttttctcatttttctctcctcagcttttctgtttacacgcctaacatgatcctggccaggtaataaatcaccggcgctgtaaaaatcacgctgtcaaagcggtctaaaatcccgccgtgaccagggatcagctttccatagtccttgatcccctgatttctcttaatggcagaggctgccagatcgccaaccatggaaataagagctcccacagcgcagattactgcaaattcggccacctgcctgtgaaaaactgccccgtaggcggcccccagaagtgctgctcccacaacacctcccactgctccttctatggatttcttcggactgagcaccggagccatcttgtgttttccaaggagcatgcccacacagtaggcacaggtgtcacagccccaggagcacaggaagatcagccacacaatatatttcccgtcaggcagctccctggtgagataaataaaggagagcatcactgccacgtacaccagggcaaaaaaagcagccataatctcaggtgcctgatatctgggataggtgaacacgtaaaccatcatgagcaggaccagcgtcaggatgattcccatcatgccatatttatcataatccagcaggatgagcccataataaataaccgctcccacataccctgcaatctcaagagaggtaaaagcagcttccctgaccttcatggccttatacagctcctgcataccgatcagggaaattccaaggagggtaaaaaacagaacataactgccgctgataatcgtagccagcgctataactaccagaaggattccgctgagcagccttgttttaaacatggttctcctccttcacgccgccatatctccggtcccttttattgtattgctcaatagcctgcactaattcctctctgtgaaaatccggccatggaacatctgtaaaataaaattctgtataagccagctgccacaaaaggtagttggacagcctctgttcgccgctggtacggatcagaaaatccgggtccggcagaccggctgtgtccagatatccgctgatggtatgctcctggatgtcactgggggacagctttcccaccttcacatcctctgccatacgtctcactgcccgggtcatctcatccctgctaccgtaatttaatgcgatctggaaatgcagctcatcatactggctggaatattcctctagctggcggatcttatcctgaatatcctggtcaaatccggttttatccccaatgacccgcactctcatccggttcctctctgaaatttttatacatttcttcagatatccccggaacaaagtcatgagatatcctacctcatccttggagcgcttccagttttctgtggaaaaagcataaaccgttaaatatttgataccaagggctttcatgtcatcacagatagtctccaggttttcgcagccctttttgtgcccatagcttctgggcattcccttcgccttggcccagcgcccgtttccatccagaataatggccacatgattgggaacgttcataagtttctcctctctacagtgaaagagagcccactggctgagctctctgttctccctttgtctatacagtcataatctccttggatttgtcttccacggctgcgtccacttccttgatatacttatctgtgaccttctgcactttttcttccagttccttgatctcatcctcagaaacatcctgttttcccagcttcttcagataatcattggcatcccggcggatattacgcacggcaaccttcgccgcctcgccttttttcttaacatcttttaccagctcttttctgcgttcctcggtaagctccgggaataccaggcggatggccttgccgtcattgttgggattcagtcccagatctgaggtgaggatcaccttctcaatagctttgatcagactggactcccatggctggatctggatcatgcgggcctcgggaaccgtgatattggccacctgctgaaggggcgtgggtgttccgtaataatcaacggacagcttgtctaaaatgtgcggattggctcgtcctgcacggatagcagctaactctccattcaaattacttaaggtcttcttcattttttcgtcatacttctgaattctctcgtccatataaaaatctccctctcctgtattaattctaaacggtaactttcgttccgctgaattttccatgtacggtatttacgatgctgttctgctcttccaaaccaaagaccagcatgggcattttattctccagacacataatggaggctgtcagatccatggctgccagcttcttgtccaccacttcctggatgttgatctcatcatatttcttagcatctggattcagctttggatcgctgtcgtagatcccatccacagcctttgccagcaaaatggcatctgcctggatctccactgcccgcagcactgtagctgtatctgtggaaaaatagggatgtcccgttcctccagcaaagaataccagcttgcccttagcaaaacagttctctacctcatccttggaataaagcttggtaaaagatccgcaggaaaacggtgtgaagatctctgtctccattcccagatacctgcagatatcagatacataaatgcagttcatgatagtggccagcattccgatctgatctgctttatttctgttgatagtctcactggtacggcctctccagaaattcccgcctccgatgacaatgcccacctgggtgccctcctgaaccaccgtgcggatctgtctggctgtctgaatcaccgtatcttcatcaaatccggtctttttcggccctgccagggcttctccgcttaatttcagtaatactcgtttcatctccataatcttatcctctgctttgttatatttaccaaatattcgtcaccgtctcctggccgttctcatccacggatgtggttacggtaaaggtatcatagaaatagttaccaatctgtcctaaatccgggtctgtctcataggttgaggaattgggtcctccaatatccggatccgctgtaagggcctcgatggaatttccgatataggtctgtgccttggctctgatatcctcattagacgggggctgttccgggacaacggtgggctccggcgtcacagaaggctcctgtgcctcaggtgtgggtgtggggtccggggtctcctcatccttctcgtctttctcatcctgttccttctgatcttcctgattggtatccgttgtgtctgtgatacccatccgcagtttcacatcagaaagagtggaataatccttcttctgggtctcgtcataatatctcgcataagggatctgatcctctgtgagatacagggtgatctgcttcatactgctgaaatccaggtctctgaagtaattttcatcaccctcctggccggtatataccacacggatgtcataggtagttccccgggctgcctcatagtagtaggaagccttctctgcactcttcagtgtaaatgctccttttactaaatcttctccccagttctcatccccgtaatcatccacatgggttcggatataaatctgcgttatttctttacctgtactgttgacaatggaaagctccgtggaagcagctgttttggttcccagcaccttggcggctgacggtgtaccggaaatcttctgcatgttcacaatattcgatttgtccccggagggtgtgatggtggcctctataacagccggctggtcgtttccatcctgatccttgtccttcccacagcctggtataagaacaaacgccagagctcccaccagcaaataaacaagtcttttcttcataataatcatcctcctggttatgggtcttgtccatttccttcccttctaattatacaggcaaactccttcttgtcaactttccccaaggtatttcacagtttttttagactttctaaatgtaatcttcataggatacctaatttcgattgacagagtccagttttatggtttatagtaatagtataccatatttatcctaaaattacgatggtaaaaagaacggaggtctattatggacgtagtaaaaacaattgaagaactggtagaaaaattcaaatccgacgaggcttttaaggaagccctgaaaaaggatcccatcaaagcaattgaggctgagatcggcgtggatcttcctgatgagcagctcaaggcaattgtagcaggggtaaaagaaaaaatcgaaggccaagaagtaaaaagtgtagtagagaatctggaagagaccgccaaggatctggtgggaaatctggagcaaaagctggaaggcctgtttaaaaaataaattttgcaagccgcatatcccctccttttcttagcggcctgttgaaaaactatatagaaaaagtccgcctcatcacaaaggggcggactttttttattacataggaaagttcttggcgcacaaagctgccaagcccctcatgagtgaggggatggggagctgaagcgggcttgcccgctttattctcaaagctttgtattgcggtactcatttgcagagatcccctccagctttttgaacaccctggaaaaatgggccacatccaaaaatcccacctcctcggaaatatctgcaatgcgcagcgcaggatccttcagaagctctttggctttatcgattcgaatctggttgagaatctcagaaaagcttttatctgtatgcttattcaaaagcttactcaaatgccactggctcacatatgtattctccgccaccttgctcagggagattttctctgcataatgctcctccatgtactgaagggcatttttcaccacaaagctgttggcattgttcagatcctcctctgccacggtgtttccgtccccgggaagttttttcacatttcccaccatgaaagagactgcctcctggatttcctccagattggacggcttcagcaagaaccgggacacgcccagacggatggcctcctgggcatagtcaaaatcccggtatccagtcagaatgctcacctgcatgtccggaaattccccctttaaagccgcgatcatcttcaagccgtccagccctggcatggcaatatccgaaaacagcagatccggccgtaccctgcggatcacatccagcccttctctcccgtcataagcagttcccgctatgacacagttgtatttttcccaagggatgattctggagattccttccacaataatgggctcgtcatctatgatcactaccttgtacatgttttctacccctcatttttcattcaagaatcttatgtgcatattatatcctattcagaccgaaaagggaactctctgcctgaaaaaatggacatcctgcatgctgcggcggatgtccattttatgctttttctcaagctgcacctaacccttcactgcaccggctgtcattcctttgatgatgtatttctgcagacatacatagactaagagcagaggaacaatgatcaaggttactacggctgccataaggccatagttggtgccttccttggaggagatctccagaagcagacgggtgatggcgaatttttccttggtacgaaggaagaactgctgggtgaacaggtcgttgtagctccacaggaagctgaagattcccactgtggcaaaggagggtttggtcagaggcatgatcaccttaaagaaaatctgataggcattgcagccttccataaaggccgcctcctccagctccacaggaagactctttatgtacccggttagtaccacaatggcaaatgccaggtttccggcgatctgcggcaggatcacggccaccagggctgctcctgtggtacctccagtgagtccccacccagattccattctggatacagggatgatggtggaaaataccgggaacatcatggctgcgataatcaggctgttcatggctgtccgaagcttaaactggtagcggacaagtgcataggatgccattcctgccaggaggatcaccaccagggctacagaacaggaaatgatcaaactgtttttataggcgcttaaaataggtactgtgtgaaacgcatccttgtagttatcagtggtaaataaggctcccagaggtaagctgaaagaatcagacatgatctgtttcctatctttaaaggagttcataatcacccaaaggatgggataaatggtagttaatgcccagacgatcaggattgcatatacgaccgtgataccggcagaaaactttttcttcttcatcttctatgttcctcccttaataatctctttctttgaagatcttgttcacaaccttggacaagagcacacccaggacaacgatcacaagagcaatggccgagctgtaatcaatatccggagactgcatggtcttgtaatacatataggttcctgtcagccaggtctttcccaatggggctccgttggggaacattacccacgggaaatcgaataccttcaaggctcctgtcacagccagcacagaacaggtacataccacattgtgcagcagcggccaggaaatataacgcaccctctgccatgttgtggctccgtcgatggatgcagattcatatagttctgtagaaatattattaagtcctgtcactaatatgatgaaataaaatcctacatactgccaggtaaccggcgacatcataacagcgatgggatacagttctttccaatttacattgtgtcctacaagctggctcagcattcccccgtcatactggaagatcaggttgaacagaacgcccagtgcggttgctgaaataacgattgggaaaaagtatacgatacggaagaattttgctcctcgtttaatattgtcaaccatcatggccaatacgatggcgatgcccacctggcctaccaatgtgacaacgatcatgatcaaagtattttttaatgcgatgtgcatgtttttatctgtcagcagactcagatagtttttatatactggttcattccatccctttgccgcagttcccaggctttttattttcataaaactgttaaggatattctggaaaaacggatagtacagaaaaacgatcataaagagaaaggccggaagtaaaaacacaaggattggctttttatttttataaatattcataataattcacgccctcttttaatttaaagttcctttcttaagaaaccgactccattttttggcagaaaaagccggaggagaagctcctccggcctttccactcatttttcgttcattatcagataatctctttcgatttacacttactgattattctgcgttctcagcaaccatatccaatacctgctggatagcatccggaatttcagtagatccttcaacgatcaatggcatgttatcaaagattggagctctttcatcctggctcagaagatcctggcaggctccggtgacaccggtggcacccttggtcatttccagagaatccttctgaagagagttaagggcattttcgtctaaggttacaccatttttcagagcagttgctgctgtctgggcaaatgtggagcaggtttcatcattgataaaggctgtgatcagatcaacggctgctgcacgtttgctctcatcttcccagcatttcttggagatgtaccatccagaagaaaggccagagataatatctgtagctttacggtcatttgctcctgggaaataagttactgtaaagttatcaatgtcgtccgtaccctgctggataccgcccatcttccaggaaccatccacataaaatgcggattttccttccaggaagctctggaatacttcgtctgcggttgcggagttggtgttttctgataagaagcctttgtcatacaggtctttaatatcctgtaagcctgctgcccatgccttgcctgctgcatcgtccagggattctggaagaactgcgtgggtggctgctgtgtcatggttgtagatgcagaattcaaaccagtaatgtggctctgctgcaagggaaacagcgattggcgtatagcctttgtctttaattgtctggcaggtctccaggaattcatcccaagttgtgtctgctccaggaatttccacccctgcgtcctcaagaactgccttgttcacgtacatgccttcccagaatccatagaaaggaactgcatactgcacaccgtccacaggagatgcgggaatcatttcatccttcatgttggaagcataatctggaaattctttgcggatctcttcgatggaaactactttctctgcttccacaaatggattggagtcattgccgttgaagtagaatagcacgtccgggtcattgccggtctcaaagtcagagatcacacgtgctttaaaggtttcatccgcgcttccggaagcatcctcaaccttatttccagtgtccttctgccatttttcaatagtctcctggtaaagctctacgttgctctctgttccagcgaaggtggtggtcacatttaaggaaaccccgtcatctgcctgaactgccatagccggaaccatggttgctgccatcataccacataatgcaagacttaaaactcgtttcttcatacttattaccctcctaatatagtttgcttcctgtttttctcaggtctcaacttgtagctttattatgcactctttttctgtaaaattgaataaccaaacctgttatttcttgtattttattgttctttctatacaacaaaaataatcaactctccacaagaatggtcaattttgccaccacatgatggccatcccccttgtgtaaggtgagccctgcctggtctccgtagatgatcttcagcctttgattcacgttggaaatccccatatttccagaagtttccttgctggtgtcataggaagggtccaaaagccgggccaccttcgcttcatcctctttggtaaactctccgtcattgaccacctccagaaagagaagcgctccttctctccacccccggatgcgcacttccccttcgccccctggtaccaccccgtgttcgatggcattttcaatgatcggctgaaggatcagacggggaaccggacactgcataagctcctcgggtatctcctttgtcactgtcagccgttttccaaggcgctccttcataatatagagataggcattcacataacgcagctcctctgccatgggaaccacaggcagcttctttctgtcaatggccgcatccataaggatggacagggattcgatcatcttggataccttctcatttccagacagtctggcctcccagttgatgatctccagggtattgttcataaaatgtgggttgatgtgggactgaagggccatgatcttagcatcccgaagggcgatctcctcctcataaatatgatcaaactggtatttcagccgttttgacatatgattgaaggattccctgagatactcaaactcctttgtcctggtatccttgtcaagctgatatcccaaattgccttcctcgatcttcttggcccctttgagcatctcctccaccggcccggagagatagcgcctggaaaggaccaggaatacaaatgccatggggatcaggaaaaggatcatgatgatgataatgtactggtagctgtacaaaggcccgaacagctcgtgcttgtttcccatgatcactgtggtgagaagaaaatcatcatccttcagcttctgatatacatacagattatttttctccactccggactgggtcttcttgtcattggcaaactccggaagtgccttccaatcctgttcctgccctgtagagaaaatttcctgcccatttatctgaattttcaccttgagcttctccggataatttaccagggtggcaaaacagtagtccatgttcagccgctgggccaggacagcccaggtcttaaaggtattgtccaccatgtttctcacaagatatagtctgccgtctttgtaataaaaaccaatggctgtgtccaatgtcatagaatattccataatgttccaggaatccttgccccagaactcctgtacctggtcataggagcctcccgcaccggaattatacaccgcatactggtcctcccagggattttccctgatcatgatcaccgtcatgctgctgtctctgcgtttcccgtactgctggctgatatagttcttagctgtagagaagaaaaagggccgtttttccttctgtttcttataatccacatagactccgtacagtgtcttgtcataggttgcctgtctggaggccgcaatggccccttccagcctctctccgcagatttggttgttgagctccagctggctggtcatctgccgcatttcatttttttcctggtctgtggccatgatccagccaacgacccccaggatcataaggaagggaatgagccagtacaacagcgacattccaatcatcttccatttcatggatggcgttttcttcccctttaacatttctgtctgtcccccctgcatctttgccgtattctttttccattttaccatcttccccccgaaaattcatcctcttccggaaaatacagtcatggtaatttttcactagagaaaaagagccccggcaaggctggtactcatatgatcagccccttgccaaacagacaaggggctgatcacataccggggctcttttttttaataattaagataattgcggtttttacagttcaaggaattcttcgaagatcctgcacagctccttggcttcctctatccgttccatctcgcagaaaatacgcagcagaggttcggttccggagaaacgggcaatgatccatcccccgttctggaaatataccttacagccgtccagataggacaccttctcaatggcatagggcagctttggaagaagcttatcctccatgaggatcttatggatctcaaccttcctctgggcgctgaatttgtagtccttctcctccatgtagatttccccgtactggtcctgaatctctttggcaacctgtgaaaccttctttcctgtcacagcgatcatctccaccaggagggcggcagcatagattccgtcttttccgttaatatggcctctcacggtaagaccgccggaagactcaccgccaataactgcatcggtctcctgcattttggcagagatatgcttaaagcctacgggaacctcatagcacacctggccgaagctctctgccacccggtccagcatgtgggtggtggccacgtttctcacacaggggcctgaccagcctttgtatttcaccagataatagtacagaagcactaaaatatcattgggatgaaggaaacgtcccgtatcatcgatcacaccgatacggtccgcgtcgccgtctgtggccacgccgatgtcacagtaccggtccagcacatagttctgcaaagaacgcaaggtggctgcattgggcgctggcagctttccgccgaacaacgtgtcatggcgttcgtggatcacctccacctcacatctggcaatggacagcagggtacgcagagaagtctggctcactccgtacatggggtcaagggccacccgcaggcccttttcccggatggcatccatgttaatgcgggaaatgatattatccagatattcattgaggggattaaattccaccaccagtccctcttccatagccttgtcataaggaatggtatctacaggaattccctgcttcacctggttttccacaatggcgaagtatttctcaatttcctttgtctgctcctcgttggcatctcttccacccttggtgaataccttaatcccgttgtagatggctgggttatgactggccgtcaccatcattccataggccatttcatgggccatcacatagtacatgatcagaggcgtgggagaagaccggtttataaaccaacaacggatgtcctctgccgcaaacacctcacaggtccacataacggcttcctttgccaggaaacggcggtcgtatccaatacagattcctttatccaccgcatcctcgtccttcatctttaaagccatagcctttgccagcatctgaatatttgccttggtaaattcatctcctataacggctctccaaccgccggttccaaatttaatcatttttactgcctccctttcaacccatcactacggttatctcatgtatactgcccggttcgcacaccgggatcttgtctgttttcactccgtccagataaagctccttcacacccttggatatgtgatctggatttttcacttgaatgttgtagaccgcctggcgccactgtctcactgctgagaatccatcccagtccttgggtatgcagggatcgatctttagatgatccatctggggccggatgcccagcatataccgtgtggcggaaaaatatgcccagccgccggttcctgtcatgaaaggatgccgtgctcttccgtaggcggtatgatccttccccataatgaactgacagtaagaatagggctctgcctcacgaatttcaattttatcattttggtaatagggacacagggcgttgtaaaattccatggcccggtctcctcttcccagcacacactctgctgcccatgcccaaggattgggatggctgaagatggaagcgttttccttcagtcccgggtaaactctggtgacgaagccaatgtcatcatctgccttggtgtaggccggcccgttcaacatgatcccatagggagtgaacagattttcatacacgctgtccatggccttcctgcccttatcctcaggtgctgccccggagagcactgcccaggcgttggactccagatggattttcccttcctggtcctgcttggttccaatctttcttccgttcttggtgattccccggatataccagtcttcatcccaaagctgtgtgtcacatacctctttcaccctctgggccattgcctggtatttctttacatcctcttctctgcccagatatctggctgcctccaggaactgattcagagcccagtaatgaaggaaggaaaccatggcgctctctcctccccccagattcagacagtcgttccagtctgcccgcagacccttgcacacgcctgtggctcccacctgctctgctgagaaatccagaatctttttcatatgctcataaactgtgccgctgcctccgtctgcataaccgtacacctgatccagaaattggaattctccagactccttcacatattccacaatggctgggataagccacagggcatcgtcggagcaggtgtcctccaggccgtggatcacatcggtaagcttgggcgtgggcaccacggtgggggatttaaagggcttcacctcatggtccggatcaaaccattctggctggaacaaatggaggccgtatccctgggataccagtccccgaagaagttccacgatccgctggcggcatttctcgggattggaatgtggaatagtcatggcatcctgtgaggtatcccggtaaccaagtcctgtcctgcctcccacttcaataaaggaggcaaatctggagaacatcacattgatctctgcctggtacaaggtccagatgttgatcaaagtgttcatcccctcattgggggtctggatctgaagcttctgctgtttttcctcccagaagcgggcaagctgttcataaaccttgtccacattggagaaatcctggtatttcctgcggattttttctcccacttcccgatttccttctcccagaaggaaaaccagacgcacctcctggcctggctgcagcacaagctgcttgtgcagggagccgcagtggttatttcccagctcgctgctgccgctgcaccgtccccgctgtacagccacaggattgtcctctgtgtggtacagaccgataaagctgtctctgaggcagtcatagctgtccggctcaaagctggcagtaaaatattgatatccgaattcctcatagaaaaggtcacattcaatgatgccgttttcataagaggaaccggctgcatacatactcatctggaagttcttgttgtccatctcaatatggtggaaagaaaattccaaataggaaaatacactgatggtccttggatggctgtcttcgtttttaatgcgcacatcccagatttccaccggatcatccatagccacgctcattttctgggaggccttgatgccgctgtactcacattcgtatatggaataggacatcccatggcggcaggtataatctgcctggtccaaaggctttcccactggctgccaggaaatgctccagtaatcctgactctcgtcatctcttaagtatacatagtggccgggccggtccatgggaaccccatttgcccggaatctggtgatccggtgatattccggagatttataaaagatatagcctcccgccgtatggttgagaactgcacacatgtccttcacacccagataattggtccaggaagtgggcagatcaaccctgtcgatcacatactctttgttcttattatcaaaatgtccgtactgcataaaaaaccctcctataaatttccctgtaaggccattataggaggtttttttcattttaggaatgcttccttatgccattaattgccgatttttgtgcaacctgtgaacagaaagctttcttccctgattctatttttccgcctctgccagcctccggatgatctggacacattccccatatcccaaggtgctggtgtttaagcacagatcgtaattttccatcctgccccagtcctggccagtgtggaaataataataatcctttctctccctgtccttctgggggatcctggagcgggcctcttttaaaggaagcttatccacctccatcaccctctggaccctttgttccatggaggaggcatagataaacacccgcaacagatcacattcctcttttaagatctggtctgcacatctgcccacaataatgcagggtccttcctgcaccagacgcttcatggtatccatctgggcctggtacagcttataaggaagcatgatccggtcctgattggtatacccgtctgccagcatggcaattccatagagaaagctggaattcttcttctcatcgtattctttgagcagtccggggctgatcccgtagcgttcccctgcgatcaacagcaggttgctgtcataaaagggaatccccatttccttggaaagcaaggagcccacttctcttcctccgcttccatactgtctgctgattgtaattgtcttcatacccttcactcctttctgattccgcctgcgccctggtttctagttatttatattatacaaaaattcttcaaaaaccgcaatactcctcaacacttttcacaatttcattttttttagaaaaatctttcgcttctggtatccattttccccgtttgtggtatataataagagggttataaaattcgaccaatatcgacggagtttaaataaatgagaaaactaaagaaagaacctgcgaaaaaaaagcagatttttatgctgtgtgttctttttgcttttgtgatactgatcttttttctattaagtatcttttttccccggggcacacagacctcattggccaatacccaggaagggatcgcatatcttcaggcactggaaagcgtggatccggccctgattgaaaatgacattaagcagcagcgcaaggaggaacgcaggcaggcactggaaaacggcaccctgtccctgtgggaccaattctatgactatgcggtcatcggagattcccgggcccttggtttttctgaccatgggtttctggaggagcaccgggtcctggcagacaaaggggccattatcagcgatgtggccgatgtgtatatggaccgccttggaaatttaaatcccggcacaattttcctgtgctttgggttaaatgatatggttaccaactggtccacagtggaagactacatccgggagattgattccattatgagcctgcttcaggcccagtttcccaatgccaagatctatctgaattccatacttccggttacctggccggcctacgagaccagtgatctatggtacaacattcctgactggaatgctgccatccaagcccactgtgaagaaacaggttatcactacatagacaatacccagactgtggaagagcatgcagacctctatgaaggagacggtgttcattttactgcaaacttctaccagtactgggccatcaatatgctcgccgaggtaaatgaatcatgaaaaaaaaattacagcccatcacgattgtccgttatgtaatggtggcagctcttctggtatttattattgtactccagtttgacaataaaatcagcaaaacccctgtggatacggttttacaaaaggttgcagccgccgcagacctgtccaatatgacgcctgcggataaccggatgttcaaacggctctacggtctgaatgcaggagattatgacggcgtggtgctctacgctcccgtcaccagtatggcagccgaagaaatgctcattgtgaaattaaaagatacctctcagagtgattctgtaaaagaggctgtggaaaagcgcctgaaaacccagatggacagctttgagggatacggcattgagcagttcaagcttctggaagaccacctattggatgtggaaggaaactacattttctatatggtacataaagatgctgccaaggcagaacaggcatttctgaaaagcctgtaacattttttaataagaaaggatattatgaaatgattttcagcagtctattcttcctgtatgtatttttaccagttacgctgatcctgtactttatcgttccctttaaagtcaaaaacctggttcttcttctgttcagcctggtattttatgcctggggggagcccatttacatattcctcatgctgttcagcattgtatttaattatttgagcggtattgaaattgcctcctacagggaaaaagaccaagaccaccaggcccggttctgtttttggtttaccgtgggggtgaatctggccatcctgggctttttcaaatattatggcttcctgctggacaacctgaatgccatcctccccttccacattccttaccgggaactggcactgcccattggaatctccttctacaccttccagactctgtcctatatcattgacgtatatttgggtaaagtggaggtacagaaaaacttaatacacttcggcacctatgtatccatgttcccccagctcatcgccggacccattgtaaaatattcggacgtggccaaacagcttgtctccagggagatctccctgcgccgctttggagaaggggccacctggttcatccggggccttggaaaaaaagtattgtttgccaacaacatcggtatggtatatgacgccatcgccctccttcccgctgacggccgcagtgtggtcacagcctgggtgggctgtctggcctacaccttccagatttattatgatttcagcgggtattccgacatggccatcggccttggaaaaatgttcggctttgactttattaagaactttgactatccctacacctcctccagcatcaccgagttctggagaagatggcacatctctctgagctcctggttccgggagtatgtgtacatcccccttggcggaaaccgggtgagtaaagggaagcatatccggaacattttcgtggtgtggctgctcaccggcttctggcacggtgcggcctggaactttatcttctggggcctttattatggactgcttctgttcctggaaaaatatgccctgaaggagcctctggaccggctgccctcccccttaaagcacgtttataccatgtgccttgtaatgatcggatgggtcctgttcttctcccctaccctgggaagcgctctttcctatgtgggaaatctgttcgggatcggcgggggcggctttatagactccacagccctttattacctgggaaccagcctgatcctttttattcttatgatcctatgtgcaggaccttttgtattcaagagattccagcactgggccctgagtacaggaaggatgaaaactgccaaaacagtcattatctataccggcattttgatcctgtgtaccgcatatcttgtgaacgcaacctataacccattcctatattttagattctaaaggaaagcgattggatgatgaacgaacaatattctgaagaacaagaaagccggaaatcccggacccggcgtgtgcacaccatacgtgcaaaaaggatttatctggccatggccgttacctttattctatgcctggctgtgtttgcgggagcgaacctgctgaaaaaggatacccagttttcccagtcagagaaccggatcctggcccagcagccagagctgtccctgaacaccctggcggacggttcctttatgacacagtttgaatcctatatatctgaccagttctttctccgggaccagtggatcagcctgaagcttcttcaggaccggattctgggtaagaaagaatccaacggcgtctatctgggaaaagacggatatctcatggaggtaccggacaaacccatccaggaaaatctgaacagaaacctggaagccatccaggatttcgccacccgctatgggaacctgaacatcagcatggctctggcccccaattccttttacattttaaaggacaagctgcctgccaatgctcccatccgggatcagcgcaaggatctggaaatgatcgagcagtccattggagggggcattcactttctggatttgatcgagcctttgcaggaacatgccaatgagcccatttactataagacagaccatcactggaccacccttggggcctattacagcttcctgtccatcgcaggcagccttgggatctccaatcccattcaggattataccgtctatacggtgtccaacgatttttccggaaccctggcatctaaaagcggatatcataaatccaaggattctgtgcaggtttacactcctgcccaagaggaaccggaatatgtggtcacctatgaggacacccagaccaaatcggcctctgtgtacagcagcgccagcctgaacgagaaggataagtataccgtcttcttcggaggaaaccatactctggtggatattgagacccccaacacagatcctcgctgcctgctgattttcaaagattcctatgccaactgctttattcccttcctgatcccttattatcgggaaatcgttgtcattgaccccagatattattatgacagcattgatcagatcatacagcgtaaaaatgtgactgatattttgttcctgtataacttaaacacctttatgggtgacggctccctggcagataccctggcaccggatgccgcttctgccgacatgggagaaccggccgctgacacgggcacagatcccacaggtacacaggacccagcccagacagaggaaaatccccagggacttgcagaggatgggcagaccggcgcctccggtgagggggatgcggcccagtctgtggatgacggggggtaccaggaatccctttatccggaggaggaaggctcaccacagagcgatgatgacggaaacagcgacactgccctggtggacggggagaatctggacagcggacaggatgacggtacagacagtggtggaaatccagacgctgaccaggccaatgtgtaaaaggaggaggatttctttgaaaattcatgaatcagcggaaaattacctggaaaccatattgatcctcagcagacagaaggatcgtgtgcgctccattgacatagccacagagcttaatttttccaaacccagcgtgagcgtggccatgaaaaacctccgggaaaatggctacatatccatggacaaggacggctatattactttaaatccatccggccgggaaattgcggagaccatctatgaaagacacagcctgctgtctgcctggctcattcagctgggggtggacgaaaaaaccgcagggcaggacgcctgccgcatggaacatgtgatcagctcagaaagcttcgaggctctgaaaaaacatgtgttaaaaagactgccctcagaaagcactgatggggacacaaaataaattctttcattagttataacacaaaagcggattgcctgaaagaaggacaatccgcttttctgattagattccatattttcttctctgttttctgaactggtttctctggaccgctccctcgtagcgtcctttctccgcctcgctggctacgatcaggccgggcacaggctttggcttattgtcttcccccacggataccatcaccaaaaaggcgcggttgactgcgtggcgcattccctgggaatcctccacatagctgtccacctccacctccatggaggttcttcccacataggtcacataccccaccagcaccaaaaggtctccttcaaaggtaggcttcttaaactgcagattgtcaatggctgctgtggtcacatttttgttcccgctgtggcgcatggccacgatcccggccacctcatcgatccactggagcaggattcctccaaacaatctgccgcaggcattgatgtgctggcgcataaccagatgaacctgctcggttctgccctcttctactgttttattctctagcatactttctctcctcactgaacccacctggcatggcttccttttttgtctcttttgaccattagcttctggtcaatctgctcctttagttctgtcacatgggatatgatcccaatgagcctgctctctcctgcaagctggtttaatatagtgatggctctctgtctggcctcttcatccagggagccaaagccttcgtctatgaacatagtgtccacatggacactcccggctgactgttggatcatatccgccatgcccagggccatagccagggcagctaaaaaggattctcccccggagagggttttcacatccctcacctggtccgctgccagactatacacatccaggtccaggcctgcctccccctgccttcccagagcatccagtcccctgcactgaagtaggaactggcccccggacatcactgccagccgtgtgttggccgcccctatcatctgctggaaatactgccgctggacataggtctgaaaatccagcctggcggtgccggacaactttccattggctgttttatagagcgtgctcaccacctgaaactcttcctccaggctcttccggatcttaaaaagctccaggatctccttctgcctggtgtcatttccataaatgagggaagacagggagactgcccgggcttccgcttccttcctgcttttctctagttctttcatctgcttttcatagatggacagatcttccggtgcttttccctcattgcggctgtgaagctgcctgtatacggtctcagcctccacaagccgtttttcataggcttcccgctgtttttcccgggaaagaatggcttccttcttttgttggagctcctctctttttgccagggcttcctggccagaggaatagaccagctgtcccttcatctgccggacaactgcatagagactcttttcctctgacaggcgttcctgaagtttttggtccctggttgtgcaggtctcctgccgctgcctcagctctgcctcccactttggaatctgttccgccagattttcatagcaccgggcccggtcttcccacaaggcctggtcttttatggcctgttcgtaggctgctgacacctggcggtgtgcctgctgaagctgtccccggatgctttccatggaaaactcctccttgagatactgctttgctttttcctttagaagctccacctgggtgttcaggcgcatttcctgggcatggcagtcctgggcagcctggctgcgttcctgatccgctctggcactttctctcttagcctgctccacctgttcctgtgtgacagcttctttggaaagtctggctttgtggggatggcacagggagccgcacactggacagggctgtccctcctccagggtggacgccagatacccggcctgtacagcgataaactctctgctgagtgcatcgtattttgcccctgccttctcataggccgcctgggcggtcttcaccttttccagggctgcctgccacaggtttttcatctggacacaggtattgtacagacctcccagttcttttatacagtccagctcttccttctgctttcgtacctgctgccttctctctgctgcctggacagggctggcctccagcttctgccgcttctgcttttggtcctgcagctctgcttccgccttattgagcttttccttttccattttcagagctttctgttcccggacattttttttggaaagctgtgcacagacggcctctttgtctgccagctcctcatattggggaagacttttctccagagtgtccagttgtgataaaacgccggccagttcttccttcttttccccgtcctggagctgatccctcttggccagcagggtcttccaggcgttaagggcagcctcttcctcctggaaggccaggagctgttccttgagcttctctgcctttgccgtcacagtaagaaggcgggcgctgtagttctggctttcctttttccaggtatcacaggctctttgaagctcctcctggcccttggacagcaaactgaggagttcctcttgagctgtggaggcctgggccttttccttccattcctgtgcaagggggctgtctggaagaaaggtcactgccttcatctcctgttccgccagcttggtattatcctccagcctgccgtaaaggtccataaaccgctccttcagccgctgctgtacctgtgcatacaaggtggtgttaaagattcgggagaaaatctcctttctctccctggatgtggcatggagcagctttcgatattctccctgggcgatcatggagatctgggtaaactgcctgaaatccacacccatgagctcctggattttctcattgatctcccggatgttccctgtaaattcacttccgtcagggagcagcaggcacacctttgctcccacacacaccatgggataaactccctccttattctttcttctcccaggccgctggtaagcaggactgcgggtaatctcatagctttggcctttttcttgaaacagaagctttacataggtctctgtgtccggggaggcatactggctgcgcatcatggtgccgtccctcaggccggcactggtctcaccgtacagggcataggtgatggcatcaaagatggtggtttttccagatcccgtatcccctgcaatgagaaaaatcccatgatcccggtgttcaaaatctatcgtctccacctccgcataggagccaaaggcagacatgatcaattttctgggcttcataattcatcctcccctgcttcccggaatacttccttcatcaaatgctcctcttccacactcatgggcacctggcggatctcctcataaaatctgcgaaaggcctccataggagagagcagccttagttcctggccgctgtccaaaagctttgccctggtccgggcattgtccaccttgatctccagcaggtattcataggcctgctccaggcgctcccgcatttgaaaactctccaggtcatccgtgatggtgatgctgacaaaatcccgggaatgtttctttccttcctttgccttttccagcacctcctccaggcttcccttgatcctgcgcacatcctggatccccttcaaaggaagaaaatcataggacaccggccttcctttttcctgtagggtgactagggtaactgcctttttgtgattttcctcgctcaccgagtatttatagggagacccgcagtagcggatatggtctcttcccactctctggggcccgtggatgtgtcccagagccacataatcaaaggactctaccacagcagcatcgatctcatccaggccccccacagccagggaggcagtctctgaatcgcaggtctgggggttttggcttccatagcggtaatactgatgggaaaggagcacattgcgctcctgatggtccaccttctcccgctccaggactttttttactgccccctcatagtccaccgtctccccctcctggaaaagtcccctcacataaccgggttttaaaaagggcagcagatagaaattcactggcccaaattcatcgaaaagagtcaccttggtcaagaattcctccggtcctgagggaggcatggtggccagatagatcccatggcggcgcagaaaaccagaggcataggaaagacgctgaggggaatcgtggttcccggcaattataaaaattggaaccgccgggcaggctgcccccagcgattccaaaaaatggtcaaaaatcccgtacgcttccccggagggtactgatttgtcgtagatatccccacagatcagcacagcgtccggagcagtctccctggcatattccacgatctgttccagcacggcttcttgattttctttgagattatatccatttaaatatttcccgatatgtaaatcggacaaatgaaaaaatttcatcagatacggtttactcctgtctttttggcagcctcagccactgccttggccactgcgtgggacactcgcttgtcaaagggattggggatgatataatctgggttcagctcatcctcctgcaccagtccggcaatggcataagcagcggccagtttcatctcatcattgatatcccttgcccgcacgtccagcgcgccccggaaaatccccgggaaggccagtacattgttgatctggttagggaagtcacttcttccggttcccacaacggctgcacctgcctccttggcttcgttgggcatgatctccggcacagggtttgccattgtaaagagaatgggatccttggccattgtgcggatcatctcctttgtcaccgtccccggtgcggacacgccgatgaacacgtctgccccctgaaatacctctgcaatggtgcctttttcctgagcccggttggtgatgcgggccatctcctctttctccccattgaggccttctctgccttcatagatggcgcctttgcggtcacacatgatcacatttttcagtcccaggctgatgagcagcttgatgatggcgatcccagccgcacctgccccggaggtgaccaccttaacctcttccatcttctttccagtgagctttaaggcattgataagggctgcggcaactaccaccgcggttccgtgctggtcatcgtggaaaatggggatatcacagcactccttcagctttctctcaatctcaaagcatctgggagctgaaatatcctccaggttcactcccccaaagcttcctgccagaaggctgacagtcttcacgatctcgtccacgtccttggtgcggacacataatggaaaagcgtccacgtcggcaaaggttttaaaaagggcacattttccttccataaccggcataccggcctcgggtccaatgtc
